(19) United States
(12) Patent Application Publication
(10) Pub. No.: US 2013/0005586 A1
(43) Pub. Date: Jan. 3, 2013

(54) METHOD OF DIAGNOSTIC OF OBESITY

(76) Inventor: Stanislav Ehrlich, Orsay (FR)

(21) Appl. No.: 13/582,375

(22) PCT Filed: Mar. 1, 2011
(86) PCT No.: PCT/EP2011/053041

§ 371 Date: Aug. 31, 2012

Related U.S. Application Data
(60) Provisional application No. 61/309,333, filed on Mar. 1, 2010.

(51) Int. Cl. C40B 20/00; C40B 40/06

(52) U.S. Cl. 506/2; 506/16

(57) ABSTRACT

A new method for diagnosing obesity is herein described, based on the determination of the absence of at least one gene from the human' gut microbiome.

[0001] The human intestinal microbiota constitutes a complex ecosystem now well recognized for its impact on human health and well being. It does contribute to maturation of the immune system and direct barrier against colonization by pathogens. Over the second half of the past century, infectious diseases have been dramatically reduced and major pathogens have been put under control. During the same period, a number of “immune” diseases have followed a constant increase in prevalence, especially in western societies. This has been the case for allergies, inflammatory bowel diseases, irritable bowel syndrome and possibly metabolic and degenerative disorders such as obesity, metabolic syndrome, diabetes and cancer. The sequence of the human genome has lead to the observation of genes associated with an increased risk for immune diseases but mutations in these genes will most often only explain a small fraction of the actual cases and genetic predisposition will require environmental triggers to actually cause a disease. Among environmental components, the intestinal microbiota has recently gained a marked recognition as a key player.

[0002] The analysis of the molecular composition of the intestinal microbiota in healthy humans indicates marked inter-individual variations which may seem paradoxical considering the high degree of conservation of major functions of the intestinal microbiota such as anaerobic digestion of alimentary fibres. Recent high throughput and culture independent molecular observations have lead to the description of a core within the human intestinal microbiota, in terms of species but also at the level of genes; i.e. a set of conserved entities that could be responsible for major conserved functionalities.

[0003] The current knowledge permits to define criteria qualifying the normal state of the human intestinal microbiota, i.e. normobiosis. This further allows identifying specific distortions from normobiosis, i.e. dysbiosis, in immune, metabolic or degenerative diseases. The exploration of dysbiosis may be viewed as a primary step providing key information for the design of strategies aiming at restoring or maintaining homeostasis and normobiosis. In addition, criteria qualifying dysbiosis in a strictly defined, well phenotyped, disease context will be valuable elements to design diagnosis models. Although so far restricted to microbiota composition and/or diversity, dysbiosis has been suspected for several diseases and in a few cases it has already been partially documented, e.g. in obesity. Indeed, nutrition plays a crucial role in directly modulating our microbiomes and health phenotypes. Poorly balanced diets can turn the gut microbiome from a partner for health to a “pathogen” in chronic diseases. Accumulating evidence supports the hypothesis that obesity and related metabolic diseases develop because of low-grade, systemic and chronic inflammation induced by diet-disrupted gut microbiota. There is thus still a need for a new, reliable method allowing a consistent diagnosis of obesity.

[0004] Most intestinal commensals cannot be cultured. Genomic strategies have been developped to overcome this limitation (Hamady and Knight, Genome Res, 19: 1141-1152, 2009). These strategies have allowed the definition of the microbiome as the collection of the genes comprised in the genomes of the microbiota (Turnbaugh et al., Nature, 449: 804-8010, 2007; Hamady and Knight, Genome Res., 19: 1141-1152, 2009). The existence of a small number of species shared by all individuals constituting the human intestinal microbiota phylogenetic core has been demonstrated (Tap et al., Environ Microbiol., 11(10): 2574-2584, 2009). Recently, a metagenomic analysis has led to the identification of an extensive catalogue of 3.3 million non-redundant microbial genes of the human gut, corresponding to 576.7 gigabases of sequence (Qin et al., Nature, 2010, doi:10.1038/nature08821).

[0005] The inventors have used a method based on the isolation and sequencing of DNA fragments from human faeces in different individuals. Since an extensive catalogue of microbial genes from the gut is now available (Qin et al., Nature, 2010, doi:10.1038/nature08821), the number of copies and the frequency of a specific sequence in a specific population (e.g. patients suffering from obesity) can be calculated. It is thus possible to identify any correlation between the presence or absence of a specific gene and the presence or absence of a specific pathology. In addition, the number of copies of a specific gene in an individual can be determined.

[0006] The inventors were able to identify genes which are significantly different between a group of obese patients, and a control group of lean, healthy people. These genes are listed in Table 1. The said genes are more numerous in lean individuals than in the patients. This observation is statistically significant, since the total number of microbial genes is not different in both populations. There is thus a loss of specific human's gut microbial genes in individuals suffering from obesity.

[0007] A first aspect of this invention is a method for diagnosing obesity, said method comprising a step of determining whether at least one gene is absent from an individual's gut microbiome. By “individual's gut microbiome”, it is herein understood all the genes constituting the microbiota of the said individual. The term “individual's gut microbiome” thus corresponds to all the genes of all the bacteria present in the said individual's gut.

[0008] A gene is absent from the microbiome when its number of copies in the microbiome is under a certain threshold value. According to the present invention, a “threshold value” is intended to mean a value that permits to discriminate samples in which the number of copies of the gene of interest corresponds to a number of copies in the individual's microbiome that is low or high. In particular, if a number of copies is inferior or equal to the threshold value, then the number of copies of this gene in the microbiome is considered low, whereas if the number of copies is superior to the threshold value, then the number of copies of this gene in the microbiome is considered high. A low copy number means that the gene is absent from the microbiome, whereas a high number of copies means that the gene is present in the microbiome. For each gene, and depending on the method used for measuring the number of copies of the gene, the optimal threshold value may vary. However, it may be easily determined by a skilled artisan based on the analysis of the microbiome of several individuals in which the number of copiesl (low or high) is known for this particular gene, and on the comparison thereof with the number of copies of a control gene.

[0009] The method of the invention thus allows the skilled person to diagnose a pathology solely on the basis of the presence or the absence of a gene from the individual's gut microbiome. There is a direct correlation between the number of copies of a specific gene and the number of bacterial cells carrying this gene. The method of the invention thus allows the skilled person to detect a dysbiosis, i.e. a microbial imbalance, by analysis of the microbiome. Not all the species in the gut have been identified, because most cannot be cultured, and identification is difficult. In addition, most species found in the gut of a given individual are rare, which makes them difficult to detect (Hamady and Knight, Genome Res., 19: 1141-1152, 2009). In this first aspect of the invention, no prior identification of the bacterial species the said gene belongs to is required. The method of diagnosis of the invention is thus not restricted to the determination of a change in the population of known gut's bacterial species, but encompasses also the bacteria which have not yet been characterized taxiconomically.

[0010] There are several ways to obtain samples of the said individual's gut microbial DNA (Sokol et al., Inflamm. Bowel Dis., 14(6): 858-867, 2008). For example, it is possible to prepare mucosal specimens, or biopsies, obtained by coloscopy. However, coloscopy is an invasive procedure which is ill-defined in terms of collection procedure from study to study. Likewise, it is possible to obtain biopies through surgery. However, even more than coloscopy, surgery is an invasive procedure, which effects on the microbial population are not known. Preferred is the faecal analysis, a procedure which has been reliably been used in the art (Bullock et al., Curr Issues Intest Microbiol.; 5(2): 59-64, 2004; Manichanh et al., Gut, 55: 205-211, 2006; Bakir et al., Int J Syst Evol Microbiol, 56(5): 931-935, 2006; Manichanh et al., Nucl. Acids Res., 36(16): 5180-5188, 2008; Sokol et al., Inflamm. Bowel Dis., 14(6): 858-867, 2008). An example of this procedure is described in the Methods section of the Experimental Examples. Faeces contain about 10¹¹ bacterial cells per gram (wet weight) and bacterial cells comprise about 50% of faecal mass. The microbiota of the faeces represent primarily the microbiology of the distal large bowel. It is thus possible to isolate and analyse large quantities of microbial DNA from the faeces of an individual. By “microbial DNA”, it is herein understood the DNA from any of the resident bacterial communities of the human gut. The term “microbial DNA” encompasses both coding and non-coding sequences; it is in particular not restricted to complete genes, but also comprises fragments of coding sequences. Faecal analysis is thus a non-invasive procedure, which yields consistent and directly-comparable results from patient to patient.

[0011] Therefore, in a preferred embodiment, the method of the invention comprises a step of obtaining microbial DNA from faeces of the said individual. In a further preferred embodiment, the faeces from said individual are collected, DNA is extracted, and the presence or absence from an individual's gut microbiome of at least one gene is determined. The presence or absence of a gene may be determined by all the methods known to the skilled person. For instance, the whole microbiome of the said individual may be sequenced, and the presence or absence of the said gene searched with the help of bioinformatics methods. One instance of such a strategy is described in the Methods section of the Experimental Examples. Alternatively, the gene of interest may be looked for in the microbiome by hybridization with a specific probe, e.g. by Southern hybridization. It will be immediately apparent to the person of skills in the art that, in this particular embodiment, although Southern hybridization is perfectly suitable, it is nevertheless more convenient and sensitive to use microarrays. In yet another embodiment, the presence of the gene of interest may be detected by amplification, in particular by quantitative PCR (qPCR). These technologies (Southern, microarrays, qPCR, etc) are now used routinely by those skilled in the art and thus do not need to be detailed here.

[0012] In another preferred embodiment, the gene which absence or presence from the individual's gut microbiome is determined is selected from the group of genes listed in Tables 1. The skilled person will have no difficulty in realizing that the more genes are tested, the higher the degree of confidence of the result. According to another further preferred embodiment, the method of the invention comprises determining the presence or absence of at least 50% of the genes listed in Table 1, more preferably, at least 75% of the genes of Table 1, even more preferably, at least 90% of the genes of Table 1.

[0013] Even though a great number of the bacterial species found in the microbial flora have not been identified, it is known that most bacteria belong to the genera Bacteroides, Clostridium, Fusobacterium, Eubacterium, Ruminococcus, Peptococcus, Peptostreptococcus, and Bifidobacterium. Other genera such as Escherichia and Lactobacillus are present to a lesser extent. Some individual species belonging to these genera have been identified, and some of the genes of these species are known. The extensive metagenomic study which has led to the identification of 3.3 million non-redundant microbial genes has also permitted the assignment of most new sequences. A gene belonging to a given species is present in an individual at the same frequency as all the other genes of the said species. It is thus possible for each of the genes identified through the method of the invention to determine whether there is a correlation between the presence or absence of the said gene and the presence or absence of a set of genes known to belong to a specific bacterial species in various individuals. Such a correlation indicates that the unknown gene belongs to the said specific bacterial species. The inventors have thus shown that some bacterial species are associated with obesity whereas other bacterial species are associated with the lean phenotype. The obese phenotype can be predicted by a linear combination of the said species, i.e. the more bacterial species associated with the obese phenotype are present in an individual's gut, and the lesser species associated with the lean phenotype in the said individual's gut, the higher the probability that the said individual suffers from obesity. For example, the absence of Bacteronides pectinophilus, Eubacterium siraeum and Clostridium phyto fermentans and the presence of Anaerotruncus colihominis in the gut of a person indicates that this person suffers from obesity.

[0014] It will be clear for the person skilled in the art that the genes of the invention can be used as biomarkers, for example during the treatment of patients suffering from obesity. Therefore, in another embodiment, the invention includes a method for monitoring the efficacy of a treatment for obesity. When a treatment is efficacious against obesity, the dysbiosis initially observed gradually disappears. Whereas some specific genes are absent from the individual's guts when that said individual is obese (e.g. the genes of Table 1), these genes reappear during the treatment. In this embodiment, the method of the invention thus comprises the steps of first determining whether at least one gene is absent from the said patient's microbiome, administering the treatment, determining if the said at least one gene is present in the patient's microbiome. In a preferred embodiment, the method of the invention comprises the steps of obtaining microbial DNA from faeces of the said individual, before and after the treatment. In a further preferred embodiment, the faeces from said individual are collected before and after the treatment, DNA is extracted, and the presence or absence from an individual's gut microbiome of at least one gene is determined.

[0015] In another preferred embodiment, the gene which absence or presence from the individual's gut microbiome is determined is selected from the group of genes listed in Tables 1. In a particular embodiment, the method of the invention comprises determining the presence or absence of at least 50% of the genes listed in Table 1, more preferably, at least 75% of the genes of Table 1, even more preferably, at least 90% of the genes of Table 1.

[0016] The present invention also includes a kit dedicated to the implementation of the methods of the invention, comprising all the genes which are absent in a patient suffering from obesity and which are present in a lean, healthy person. In particular, the present invention relates to a microarray dedicated to the implementation of the methods according to the invention, comprising probes binding to all the genes absent in a patient suffering from obesity and present in a lean person. In a preferred embodiment, said microarray is a nucleic acid microarray. According to the invention, a “nucleic microarray” consists of different nucleic acid probes that are attached to a substrate, which can be a microchip, a glass slide or a microsphere-sized bead. A microchip may be constituted of polymers, plastics, resins, polysaccharides, silica or silica-based materials, carbon, metals, inorganic glasses, or nitrocellulose. Probes can be nucleic acids such as cDNAs (“cDNA microarray”) or oligonucleotides (“oligonucleotide microarray”, the oligonucleotides being about 25 to about 60 base pairs or less in length). Alternatively to nucleic acid technology, quantitative PCR may be used and amplification primers specific for the genes to be tested are thus also very useful for performing the methods according to the invention. The present invention thus further relates to a kit for diagnosing obesity in a patient, comprising a dedicated microarray as described above or amplification primers specific for genes absent in a patient suffering from obesity and present in a healthy person. Whereas these kits may allow the skilled person to detect 10%, 25%, 50% or 75% of the said genes, they are most useful when they allow the detection of 90%, 95%, 97.5% or even 99% of the said genes. Thus a microarray according to the invention will comprise probes binding to at least 10%, 25%, 50% or 75%, and preferably 90%, 95%, 97.5%, and even more preferably at least 99% of the said genes. Likewise a kit for quantitative PCR will contain primers allowing the amplification of at least 10%, 25%, 50% or 75%, and preferably 90%, 95%, 97.5%, and even more preferably at least 99% of the said genes. In a preferred embodiment, the genes which are absent in an obese patient and are present in lean people are the genes listed in Table 1.

### FIGURE LEGENDS

[0017] FIG. 1: Overall analysis of the BMI genes: there are more BMI genes in healthy individuals. A) Plot of the number of genes per individual in function the BMI indicates that the genes are more numerous in lean than the obese individuals. B) Ranking by gene number and binning by groups of 20 illustrates that lean are at the top of the distribution—out of 67 lean 50 are in the first three bins.

[0018] FIG. 2: A) A linear combination of 4 species discriminates well the obesity phenotype for the part of the cohort that harbors them at the levels defined (at least 50% of the genes); lean and obese individuals are shown as blue and red dots, respectively; B) Groups of individuals having at least half of the genes of “good species” in excess to the “bad” or half of the genes of a “bad species” in excess to “good” (cutoffs>0.5 & <−0.5, respectively).

### METHODS

[0019] Human Faecal Sample Collection.

[0020] Danish individuals were from the Inter-99 cohort (Toft. et al., Prev. Med., 47: 378-383, 2008), varying in phenotypes according to BMI (body/mass index) and status towards obesity/diabetes. Patients and healthy controls were asked to provide a frozen stool sample. Fresh stool samples were obtained at home, and samples were immediatelyfrozen by storing them in their home freezer. Frozen samples were delivered to the hospital using insulating polystyrene foam containers, and then they were stored at −80° C. until analysis.

[0021] DNA Extraction.

[0022] A frozen aliquot (200 mg) of each faecal sample was suspended in 250 μl of guanidine thiocyanate, 0.1M Tris (pH 7.5) and 40 μl of 10% N-lauroyl sarcosine. Then, DNA extraction was conducted as previously described (Manichanh et al., Gut, 55: 205-211, 2006). The DNA concentration and its molecular size were estimated by nanodrop (Thermo Scientific) and agarose gel electrophoresis.

[0023] DNA Library Construction and Sequencing.

[0024] DNA library preparation followed the manufacturer's instruction (Illumina). We used the same workflow as described elsewhere to perform cluster generation, template hybridization, isothermal amplification, linearization, blocking and denaturization and hybridization of the sequencing primers. The base-calling pipeline (version IlluminaPipeline-0.3) was used to process the raw fluorescent images and call sequences. We constructed one library (clone insert size 200 bp) for each of the first 15 samples, and two libraries with different clone insert sizes (135 by and 400 bp) for each of the remaining 109 samples for validation of experimental reproducibility. To estimate the optimal return between the generation of novel sequence and sequencing depth, we aligned the Illumina GA reads from samples MH0006 and MH0012 onto 468,335 Sanger reads totalling to 311.7 Mb generated from the same two samples (156.9 and 154.7 Mb, respectively), using the Short Oligonucleotide Alignment Program (SOAP) (Li et al., Bioinformatics, 25: 1966-1967, 2009). and a match requirement of 95% sequence identity. With about 4 Gb of Illumina sequence, 94% and 89% of the Sanger reads (for MH0006 and MH0012, respectively) were covered. Further extensive sequencing, to 12.6 and 16.6 Gb for MH0006 and MH0012, respectively, brought only a moderate increase of coverage to about 95%. More than 90% of the Sanger reads were covered by the Illumina sequences to a very high and uniform level, indicating that there is little or no bias in the Illumina GA sequence. As expected, a large proportion of Illumina sequences (57% and 74% for M0006 and M0012, respectively) was novel and could not be mapped onto the Sanger reads. This fraction was similar at the 4 and 12-16 Gb sequencing levels, confirming that most of the novelty was captured already at 4 Gb.

[0025] We generated 35.4-97.6 million reads for the remaining 122 samples, with an average of 62.5 million reads. Sequencing read length of the first batch of 15 samples was 44 by and the second batch was 75 bp.

[0026] Public Data Used

[0027] The sequenced bacteria genomes (totally 806 genomes) deposited in GenBankwere downloaded from the NCBI database (http://www.ncbi.nlm.nih.gov/) on 10 Jan. 2009. The known human gut bacteria genome sequences were downloaded from HMP database (http://www.hmpdacc-resources.org/cgi-bin/hmp_catalog/main.cgi), GenBank (67 genomes), Washington University in St Louis (85 genomes, version April 2009, http://genome.wust1.edu/pub/organism/Microbes/Human_Gut_Microbiome/), and sequenced by the MetaHIT project (17 genomes, version September 2009, http://www.sanger.ac.uk/pathogens/metahit/). The other gut metagenome data used in this project include: (1) human gut metagenomic data sequenced from US individuals (Zhang et al., Proc. Natl Acad. Sci. USA, 106: 2365-2370, 2009), which was downloaded from NCBI with the accession SRA002775; (2) human gut metagenomic data from Japanese individuals (Kurokawa et al., DNA Res. 14: 169-181, 2007), which was downloaded from P. Bork's group at EMBL (http://www.bork.embl.de). The integrated NR database we constructed in this study included NCBI-NR database (version April 2009) and all genes from the known human gut bacteria genomes.

[0028] Illumina GA Short Reads De Novo Assembly.

[0029] High-quality short reads of each DNA sample were assembled by the SOAP de novo assembler (Li. & Zhu, Genome Res., 20(2): 265-272, 2010). In brief, we first filtered the low abundant sequences from the assembly according to 17-mer frequencies The 17-mers with depth less than 5 were screened in front of assembly, for these low-frequency sequences were very unlikely to be assembled, whereas removing them would significantly reduce memory requirement and make assembly feasible in an ordinary supercomputer (512 GB memory in our institute). Then the sequences were processed one by one and the de Bruijn graph data format was used to store the overlap information among the sequences. The overlap paths supported by a single read were unreliable and removed. Short low-depth tips and bubbles that were caused by sequencing errors or genetic variations between microbial strains were trimmed and merged, respectively. Read paths were used to solve the tiny repeats. Finally, we broke the connections at repeat boundaries, and outputted the continuous sequences with unambiguous connections as contigs. The metagenomic special model was chosen, and parameters ‘-K 21’ and ‘-K 23’ were used for 44 by and 75 by reads, respectively, to indicate the minimal sequence overlap required. After de novo assembly for each sample independently, we merged all the unassembled reads together and performed assembly for them, as to maximize the usage of data and assemble the microbial genomes that have low frequency in each read set, but have sufficient sequence depth for assembly by putting the data of all samples together.

[0030] Validating Illumina Contigs Using Sanger Reads.

[0031] We used BLASTN (WUBLAST 2.0) to map Sanger reads from samples MH0006 and MH0012 (156.9 Mb and 154.7 Mb, respectively) to Illumina contigs (single best hit longer than 75 by and over 95% identity) from the same samples. Each alignment was scanned for breakage of collinearity where both sequences have at least 50 bases left unaligned at one end of the alignment. Each such breakage was considered an assembly error in the Illumina contig at the location where collinearity breaks. Errors within 30 by from each other were merged. An error was discarded if there exists a Sanger read that agrees with the contig structure for 60 by on both sides of the error. For comparison, we repeated this on a Newbler2 assembly of 454 Titanium reads from MH0006 (550 Mb reads). We estimate 14.12 errors per Mb of contigs for the Illumina assembly, which is comparable to that of the 454 assembly (20.73 per Mb). 98.7% of Illumina contigs that map at least one Sanger read were collinear over 99.55% of the mapped regions, which is comparable to 97.86% of such 454 contigs being collinear over 99.48% of the mapped regions.

[0032] Evaluation of Human Gut Microbiome Coverage.

[0033] The Illumina GA reads were aligned against the assembled contigs and known bacteria genomes using SOAP by allowing at most two mismatches in the first 35-bp region and 90% identity over the read sequence. The Roche/454 and Sanger sequencing reads were aligned against the same reference using BLASTN with 1×10⁻⁸, over 100 by alignment length and minimal 90% identity cutoff. Two mismatches were allowed and identity was set 95% over the read sequence when aligned to the GA reads of MH0006 and MH0012 to Sanger reads from the same samples by SOAP.

[0034] Gene Prediction and Construction of the Non-Redundant Gene Set.

[0035] We use MetaGene (Noguchi et al., Nucleic Acids Res., 34, 5623-5630, 2006)—which uses di-codon frequencies estimated by the GC content of a given sequence, and predicts a whole range of ORFs based on the anonymous genomic sequences—to find ORFs from the contigs of each of the 124 samples as well as the contigs from the merged assembly. The predicted ORFs were then aligned to each other using BLAT (Kent et al., Genome Res., 12: 656-664, 2002). A pair of genes with greater than 95% identity and aligned length covered over 90% of the shorter gene was grouped together. The groups sharing genes were then merged, and the longest ORF in each merged group was used to represent the group, and the other members of the group were taken as redundancy. Therefore, we organized the non-redundant gene set from all the predicted genes by excluding the redundancy. Finally, the ORFs with length less than 100 by were filtered. We translated the ORFs into protein sequences using the NCBI Genetic Codes (Ley et al., Nature Rev. Microbiol., 6: 776-788, 2008).

[0036] Identification of Genes.

[0037] To make a balance between identifying low-abundance genes and reducing the error-rate of identification, we explored the impact of the threshold set for read coverage required to identify a gene in individual microbiomes. The number of genes decreased about twice when the number of reads required for identification was increased from 2 to 6, and changed slowly thereafter. Nevertheless, to include the rare genes into the analysis, we selected the threshold of 2 reads.

[0038] Gene Taxonomic Assignment.

[0039] Taxonomic assignment of predicted genes was carried out using BLASTP alignment against the integrated NR database. BLASTP alignment hits with e-values larger than 1×10⁻⁵ were filtered, and for each gene the significant matches which were defined by e-values<10×e-value of the top hit were retained to distinguish taxonomic groups. Then we determined the taxonomical level of each gene by the lowest common ancestor (LCA)-based algorithm that was implemented in MEGAN (Huson et al., Genome Res., 17: 377-386, 2007). The LCA-based algorithm assigns genes to taxa in the way that the taxonomical level of the assigned taxon reflects the level of conservation of the gene. For example, if a gene was conserved in many species, it was assigned to the LCA rather than to a species.

[0040] Gene Functional Classification.

[0041] We used BLASTP to search the protein sequences of the predicted genes in the eggNOG database (Jensen et al., Nucleic Acids Res., 36: D250-D254, 2008) and KEGG database (Kanehisa et al., Nucleic Acids Res., 32: D277-D280, 2004) with e-value<1×10⁻⁵. The genes were annotated as the function of the NOGs or KEGG homologues with lowest e-value. The eggNOG database is an integration of the COG and KOG databases. The genes annotated by COG were classified into the 25 COG categories, and genes that were annotated by KEGG were assigned into KEGG pathways.

[0042] Determination of Minimal Gut Bacterial Genome.

[0043] The number of non-redundant genes assigned to the eggNOG clusters was normalized by gene length and cluster copy number. The clusters were ranked by normalized gene number and the range that included the clusters encoding essential Bacillus subtilis genes was determined, computing the proportion of these clusters among the successive groups of 100 clusters. Analysis of the range gene clusters involved, besides iPath projections, use of KEGG and manual verification of the completeness of the pathways and protein machineries they encode.

[0044] Determination of Total Functional Complement and Minimal Metagenome.

[0045] We computed the total and shared number of orthologous groups and/or gene families present in random combinations of n individuals (with n=52 to 124, 100 replicates per bin). This analysis was performed on three groups of gene clusters: (1) known eggNOG orthologous groups (that is, those with functional annotation, excluding those in which the terms [Uu]ncharacteri[sz] ed, [Uu]nknown, [Pp]redicted or [Pp]utative occurred); (2) all eggNOG orthologous groups; (3) all orthologous groups plus gene families constructed from remaining genes not assigned to the two above categories. Families were clustered from all-against-all BLASTP results using MCL (van Dongen, Ph. D. Thesis, Univ. Utrecht, 2000) with an inflation factor of 1.1 and a bit-score cutoff of 60.

[0046] Rarefaction Analysis.

[0047] Estimation of total gene richness was done using EstimateS on 100 randomly picked samples due to memory limitations. Because the CV value was >0.5, both chao2 (classic) and ICE richness estimators were calculated and the larger estimate of the two (ICE) was used. The estimate for this sample size was 3,621,646 genes (ICE) whereas S_{obs} (Mao Tau) was 3,090,575 genes, or 85.3%. The ICE estimator curve did not completely saturate, indicating that additional samples will need to be added to achieve a final, conclusive estimate.

[0048] Common Bacterial Core.

[0049] To eliminate the influence of very similar strains and assess the presence of known microbial species among the individuals of the cohort, we used 650 sequenced bacterial and archaeal genomes as a reference set. The set was composed from 932 publicly available genomes, which were grouped by similarity, using a 90% identity cutoff and the similarity over at least 80% of the length. From each group only the largest genome was used. Illumina reads from 124 individuals were mapped to the set, for species profiling analysis and the genomes originating from the same species (by differing in size >20%) curated by manual inspection and by using the 16S-based clustering when the sequences were available.

[0050] Relative Abundance of Microbial Genomes Among Individuals.

[0051] We computed the genome coverage by uniquely mapping Illumina reads and normalized it to 1 Gb of sequence, to correct for different sequencing levels in different individuals. The coverage was summed over all species of the non-redundant bacterial genome set for each individual and the proportion of each species relative to the sum calculated.

[0052] Species Co-Existence Network.

[0053] For the 155 species that had genome coverage by the Illumina reads ≧1% in at least one individual we calculated the pair-wise inter-species Pearson correlations between sequencing depths (abundance) throughout the entire cohort of 124 individuals. From the resulting 11,175 inter-species correlations, correlations less than −0.4 or above 0.4 (n=342) were visualized in a graph using Cytoscape (Shannon et al., Genome Res. 13: 2498-2504, 2003). displaying the average genome coverage of each species as node size in the graph.

### Results

[0054] A Summary Description of the Cohort & the Method Used.

[0055] A total of 177 Danish individuals were studied. They comprised 67 people with a BMI<27.5 (lean, healthy controls) and 110 individuals with a BMI>27.5 (obese patients). The entire gene catalog of 3.3 million genes was searched by ranksum search for those that are significantly different between the two groups. Gene frequency was normalized by the gene size (larger genes are bigger targets and are seen more often) and the difference in the sequencing extent for different individuals. The number of significantly different genes is affected by the thresholds and the splits into groups. In brief, 1327 “BMI-related genes” (also referred to herein as BMI genes) were found at p<10⁻⁴.

[0056] Overall Analysis of the BMI Genes.

[0057] The significantly different genes, i.e. BMI-related genes, were plotted by individual (FIG. 1A). The median number of BMI genes in a healthy individual was 476, and only 179 in an obese patient. The median gene number is very significantly different among the 2 groups (p<10⁻¹⁷, one-tailed t test). When the genes were ranked by gene number and binned by groups of 20, 50 individuals out of 67 were in the first three bins, illustrating that lean individuals are at the top of the distribution (FIG. 1B).

[0058] Comparison of the Distribution of All Genes and BMI Genes.

[0059] The distribution of all genes of the microbiome and of the BMI genes was compared. There is much less difference in all gene numbers and frequency between the two groups than the BMI genes. The BMI gene distribution does not reflect simply the all gene distribution. The loss of genes in the obese patients is thus significant.

[0060] BMI-Related Species.

[0061] The BMI genes were allocated to species, using the taxonomic assignments attributed to the genes in the 3.3 million catalog (Qin et al., Nature, 2010, in press, doi:10.1038/nature08821). It was found that 59.8% of the BMI genes, but only 32.8% of all genes, were from Firmicutes. On the other hand, the frequency of Bacteroidetes was 8.1% for BMI genes and 18.4% for all the genes of the microbiome. Therefore, obesity is associated to changes in Firmicutes. The species were first identified by the number of genes assigned to them amongst the BMI genes. Then other genes from the same species were pulled out of the catalog and the presence of 50 representative genes for each species assessed in different individuals (this compared very favorably with the use of a single 16S gene, which is currently done to identify a species). The species was considered present if at least half of the marker genes were found in an individual. The significance of the distribution between the healthy and the patients was estimated by the comparison with the all cohort distribution (67 to 110) using the Chi2 test. Bacteronides pectinophilus, Eubacterium siraeum and Clostridium phyto fermentans were associated with the healthy population (p=2.1×10⁻³, p=3.5×10⁻⁴, and p=6.1×10⁻⁴, respectively), i.e. they tended to be absent from the obese patients. On the other hand, Anaerotruncus colihominis was associated with the patient cohort (p=1.4×10⁻²). On the basis of the identification of species, it was demonstrated that the linear combination of these 4 species fully predicts the obesity phenotype (FIG. 2A). Healthy individuals and patients are shown as blue and red dots, respectively. The species presence (the ordinate) corresponds to the sum of the genes the of “good species” (anti-associated with obesity) minus the genes of the “bad species” (associated with obesity). The individuals are ranked by the species presence (the abscissa). If an individual has excess of the “good species” genes, he or she will be on the top of the rank and tend to be healthy, while if there is an excess of “bad species” genes, he or she will be at the right and tend to be sick. This is also illustrated in FIG. 2B, with groups of individuals having at least half of the genes of good species in excess to the bad or half of the genes of a bad species in excess to good (cutoffs>0.5 & <−0.5, respectively). The distribution of individuals is indicated by red and blue bars and the probability of the distributions (Chi2) shown above the two significantly different groups. The cohort composition is shown for comparison. The accuracy of discrimination is computed as correctly vs incorrectly classified individuals (correct 64, false 15).

TABLE 1
BMI genes

| ID | NOG | KO | Map | Name(NR) |
|---|---|---|---|---|
| 6902 | COG3451 | NA | NA | Faecalibacterium prausnitzii |
| 9549 | NA | NA | NA | — |
| 10658 | NA | NA | NA | — |
| 11041 | COG0048 | K02950 | NA | Bacteroidales |
| 11459 | COG0708 | K01142 | map03410 | Eubacterium ventriosum |
| 12798 | NA | NA | NA | Bacteria |
| 13291 | NA | NA | NA | Alistipes putredinis |
| 14497 | NA | NA | NA | — |
| 15094 | COG3451 | NA | NA | Clostridium leptum |
| 16910 | NA | NA | NA | — |
| 19436 | COG1506 | K01278 | NA | Alistipes putredinis |
| 22100 | NA | NA | NA | — |
| 39244 | NA | K02014 | NA | Bacteroides ovatus |
| 49082 | COG1301 | NA | NA | Bacteroidales |
| 50933 | COG2384 | K06967 | NA | Faecalibacterium prausnitzii |
| 52448 | COG2407 | NA | NA | — |
| 52602 | COG0706 | K03217 | NA | Faecalibacterium prausnitzii |
| 62609 | COG2070 | K00459 | map00910 | Cupriavidus pinatubonensis |
| 62613 | COG1960 | K00248 | map00071 | Anaerostipes caccae |
| 62614 | COG2086 | K03521 | NA | Eubacterium hallii |
| 72965 | COG2256 | K07478 | NA | Clostridium cellulolyticum |
| 73911 | NA | NA | NA | Clostridium cellulolyticum |
| 79540 | NA | NA | NA | Clostridium |
| 88849 | NOG09739 | NA | NA | Clostridiales |
| 90256 | COG0050 | K02358 | NA | Desulfovibrio piger |
| 91577 | COG0504 | K01937 | map00240 | Alistipes putredinis |
| 115552 | NA | K03046 | map03020 | Bacteroides capillosus |
| 115887 | NA | NA | NA | — |
| 116445 | NA | NA | NA | — |
| 119925 | NA | K03088 | NA | Clostridium asparagiforme |
| 119929 | NA | NA | NA | — |
| 122057 | NA | NA | NA | Caldicellulosiruptor saccharolyticus |
| 122061 | NA | K10188 | NA | Anaerocellum thermophilum |
| 122064 | NA | NA | NA | — |
| 133411 | NA | NA | NA | — |
| 133755 | NA | NA | NA | — |
| 136583 | NOG17478 | NA | NA | Clostridiales |
| 137542 | NA | NA | NA | — |
| 138082 | COG0582 | K04763 | NA | Firmicutes |
| 146660 | NA | K02035 | NA | Anaerococcus hydrogenalis |
| 162617 | COG0270 | K00558 | map00271 | Bacteroides pectinophilus |
| 173708 | NA | NA | NA | — |
| 174206 | COG5504 | NA | NA | Clostridium difficile |
| 175969 | COG1475 | K03497 | NA | — |
| 224681 | COG0178 | K03701 | NA | Bacteroides capillosus |
| 225907 | COG0592 | K02338 | map03030 | Bacteroides capillosus |
| 225953 | COG0231 | K02356 | NA | Desulfitobacterium hafniense |
| 234271 | COG0024 | K01265 | NA | Bacteroides capillosus |
| 235177 | COG0564 | K06179 | NA | Bacteroides capillosus |
| 242887 | NA | NA | NA | — |
| 246223 | COG0358 | K02316 | map03030 | Heliobacterium modesticaldum |
| 246224 | COG0305 | K01529 | map00790 | Clostridiales |
| 250611 | COG0860 | NA | NA | Anaerofustis stercorihominis |
| 265214 | COG3956 | K02499 | NA | Bacteria |
| 278309 | NA | NA | NA | Clostridium bartlettii |
| 283745 | COG0756 | K01520 | map00240 | Clostridium |
| 285668 | NA | NA | NA | — |
| 298274 | NA | NA | NA | Coprococcus comes |
| 307613 | COG1269 | NA | NA | Dorea formicigenerans |
| 308567 | COG1879 | NA | NA | Clostridiales |
| 308629 | NA | NA | NA | Clostridium bolteae |
| 311862 | COG0440 | NA | NA | Bacteroides capillosus |
| 313271 | NA | NA | NA | — |
| 319760 | NA | K01273 | NA | Clostridium difficile |
| 322345 | NA | NA | NA | Anaerotruncus colihominis |
| 327975 | COG3505 | K03205 | NA | Clostridiales |
| 330101 | COG0766 | K00790 | map00530 | Bacteria |
| 330692 | COG4717 | NA | NA | Clostridium perfringens |
| 336242 | COG0548 | K00930 | map00220 | — |
| 338413 | COG2323 | NA | NA | Clostridium |
| 339122 | NA | NA | NA | — |
| 340553 | COG2972 | K07704 | map02020 | Clostridium hylemonae |
| 342386 | NOG06096 | NA | NA | Clostridium |
| 342915 | COG0584 | K01126 | map00564 | Firmicutes |
| 347956 | COG1126 | K10038 | map02010 | Bacteria |
| 350967 | COG4905 | K06950 | NA | Clostridiales |
| 358755 | NOG06495 | NA | NA | Coprococcus comes |
| 359744 | COG3959 | K00615 | map00030 | Clostridiales |
| 360143 | COG0188 | K02469 | NA | Bacteria |
| 376654 | COG1725 | K07979 | NA | Clostridiales |
| 379402 | COG0787 | K01775 | map00252 | Clostridium phytofermentans |
| 410894 | COG0542 | NA | NA | Bacteria |
| 447063 | NA | NA | NA | Ruminococcus lactaris |
| 450567 | COG2071 | K07010 | NA | Clostridium bolteae |
| 457960 | COG0351 | K00877 | map00730 | Faecalibacterium prausnitzii |
| 457996 | COG0491 | NA | NA | Faecalibacterium prausnitzii |
| 458062 | COG1702 | NA | NA | Faecalibacterium prausnitzii |
| 458092 | COG1109 | K03431 | map00530 | Faecalibacterium prausnitzii |
| 458657 | COG0368 | K02233 | map00860 | Faecalibacterium prausnitzii |
| 458959 | COG2267 | K01048 | map00564 | Faecalibacterium prausnitzii |
| 458961 | COG0561 | K07024 | NA | Faecalibacterium prausnitzii |
| 459167 | COG2239 | NA | NA | Faecalibacterium prausnitzii |
| 459170 | COG1362 | K01267 | NA | — |
| 459293 | COG1284 | NA | NA | Faecalibacterium prausnitzii |
| 460879 | COG1197 | K03723 | map03420 | Faecalibacterium prausnitzii |
| 461115 | COG0144 | K03500 | NA | Faecalibacterium prausnitzii |
| 461216 | COG0419 | K03546 | NA | Faecalibacterium prausnitzii |
| 462093 | COG0039 | K00016 | map00010 | Roseburia inulinivorans |
| 462145 | COG0635 | K02495 | map00860 | Faecalibacterium prausnitzii |
| 462320 | COG3279 | NA | NA | — |
| 466171 | NA | NA | NA | Clostridiales |
| 466172 | COG3505 | K03205 | NA | Bacteria |
| 482432 | NA | NA | NA | Clostridium butyricum |
| 483703 | COG0080 | K02867 | NA | Clostridium |
| 488420 | NA | NA | NA | — |
| 489505 | NA | NA | NA | Coprococcus eutactus |
| 497277 | COG2706 | K01057 | map00030 | Clostridium |
| 527922 | COG1653 | K10117 | NA | — |
| 530930 | NA | NA | NA | — |
| 546887 | NA | NA | NA | — |
| 553803 | NA | K07216 | NA | Roseburia inulinivorans |
| 568486 | COG4219 | K02547 | NA | Clostridium |
| 569928 | NA | NA | NA | — |
| 569929 | NA | NA | NA | Haemophilus influenzae |
| 570360 | COG0277 | K00104 | map00630 | Bacteria |
| 576044 | NA | NA | NA | — |
| 577683 | NOG25439 | NA | NA | Pedobacter |
| 580103 | COG0648 | K01151 | map03410 | Faecalibacterium prausnitzii |
| 594250 | COG1695 | K10947 | NA | Eubacterium siraeum |
| 594682 | NA | NA | NA | Eubacterium siraeum |
| 594949 | COG2050 | K02614 | NA | Eubacterium siraeum |
| 595409 | COG1687 | NA | NA | Eubacterium siraeum |
| 595644 | NA | NA | NA | Eubacterium siraeum |
| 596031 | COG3843 | NA | NA | Bacteroides pectinophilus |
| 596742 | COG0834 | K02030 | NA | Eubacterium siraeum |
| 596786 | COG1551 | K03563 | NA | Eubacterium siraeum |
| 596787 | COG1699 | NA | NA | Eubacterium siraeum |
| 598043 | NA | NA | NA | — |
| 598171 | COG1360 | K02557 | NA | Eubacterium siraeum |
| 598533 | COG0055 | K02112 | map00190 | Chthoniobacter flavus |
| 598878 | NA | NA | NA | — |
| 599210 | NA | NA | NA | Eubacterium siraeum |
| 613127 | NA | NA | NA | Clostridium phytofermentans |
| 618702 | NA | NA | NA | Mesoplasma forum |
| 618916 | NA | NA | NA | Bacteroides intestinalis |
| 670852 | COG0265 | K01362 | NA | Clostridium asparagiforme |
| 684780 | COG0367 | K01953 | map00252 | Desulfovibrio desulfuricans |
| 694886 | COG1876 | K07260 | NA | Clostridium thermocellum |
| 726129 | COG0196 | K00861 | map00740 | Faecalibacterium prausnitzii |
| 735834 | COG4804 | NA | NA | Roseburia inulinivorans |
| 740278 | COG3177 | NA | NA | Clostridium leptum |
| 744341 | COG1070 | K00854 | map00040 | Clostridia |
| 744429 | COG0790 | K07126 | NA | Candidatus Amoebophilus asiaticus |
| 745495 | NA | NA | NA | — |
| 747791 | COG0493 | K00266 | NA | Firmicutes |
| 749395 | COG0426 | K00540 | NA | Clostridium |
| 749585 | COG1219 | K03544 | NA | Clostridium phytofermentans |
| 750039 | COG0201 | K03076 | NA | Clostridium phytofermentans |
| 750165 | NA | NA | NA | — |
| 750765 | COG0448 | K00975 | map00500 | Clostridium bolteae |
| 750767 | COG0448 | K00975 | map00500 | Coprococcus comes |
| 752580 | COG1293 | NA | NA | Clostridiales |
| 752649 | COG0465 | K03798 | NA | Blautia hydrogenotrophica |
| 753326 | COG0540 | K00609 | map00240 | Ruminococcus torques |
| 754420 | COG1966 | K06200 | NA | Bacteria |
| 754646 | COG2205 | K07646 | map02020 | Clostridium |
| 754647 | COG1283 | K03324 | NA | Bacteroides capillosus |
| 755381 | COG0568 | K03086 | NA | Clostridiales |
| 756805 | COG0436 | K00821 | map00300 | Eubacterium ventriosum |
| 758713 | COG0743 | K00099 | map00100 | Ruminococcus torques |
| 758854 | COG0452 | K06411 | NA | Clostridium phytofermentans |
| 760259 | COG0583 | K05817 | NA | Clostridium hiranonis |
| 760836 | COG2217 | K01534 | NA | Bacteria |
| 761022 | COG1879 | K10439 | NA | Thermoanaerobacter tengcongensis |
| 761910 | NA | NA | NA | — |
| 763343 | NA | NA | NA | Collinsella stercoris |
| 763741 | COG2873 | K01740 | map00271 | Ruminococcus obeum |
| 763946 | COG0840 | K03406 | NA | Heliobacterium modesticaldum |
| 764336 | COG1928 | K00728 | map01030 | — |
| 765330 | COG1109 | K01840 | map00051 | Clostridiales |
| 766445 | COG2966 | NA | NA | Dorea formicigenerans |
| 767171 | COG0608 | K07462 | map03410 | Clostridium phytofermentans |
| 768679 | COG2385 | K06381 | NA | Clostridium phytofermentans |
| 768969 | COG3426 | K00929 | map00650 | Clostridiales |
| 769544 | COG3842 | K02052 | map02010 | Anaerofustis stercorihominis |
| 769550 | NA | NA | NA | — |
| 771102 | COG3321 | K10817 | map00522 | Bacteria |
| 772837 | COG2755 | K01045 | map00363 | Dorea longicatena |
| 772842 | NA | NA | NA | Clostridium phytofermentans |
| 775519 | COG2265 | K00599 | map00150 | Eubacterium siraeum |
| 776996 | COG0825 | K01962 | map00061 | Eubacterium siraeum |
| 778526 | COG0085 | K03043 | map03020 | Clostridia |
| 783883 | COG2730 | K01179 | map00500 | Eubacterium siraeum |
| 784098 | COG0144 | K03500 | NA | — |
| 784499 | NA | NA | NA | — |
| 786679 | COG3291 | NA | NA | Eubacterium siraeum |
| 787080 | COG4625 | NA | NA | Eubacterium siraeum |
| 790377 | NA | NA | NA | Eubacterium siraeum |
| 791889 | NA | NA | NA | Eubacterium siraeum |
| 791890 | COG1472 | K01207 | map00511 | Eubacterium siraeum |
| 792637 | COG0366 | K01200 | NA | Eubacterium siraeum |
| 793094 | COG0840 | K03406 | NA | Eubacterium siraeum |
| 793149 | NA | NA | NA | Eubacterium siraeum |
| 793469 | NA | NA | NA | Eubacterium siraeum |
| 794741 | NA | NA | NA | — |
| 796765 | COG1132 | K06147 | NA | Eubacterium siraeum |
| 797076 | COG0657 | K01181 | NA | Eubacterium siraeum |
| 797363 | COG3279 | K07705 | NA | Eubacterium siraeum |
| 806068 | COG0500 | K00599 | map00150 | Bacteroides |
| 806228 | COG0547 | K00766 | map00400 | Bacteroides intestinalis |
| 807174 | NOG23778 | NA | NA | Faecalibacterium prausnitzii |
| 809707 | COG4716 | K10254 | NA | Faecalibacterium prausnitzii |
| 809761 | NA | NA | NA | — |
| 809996 | COG4988 | K06148 | NA | Bacteria |
| 833652 | NA | NA | NA | — |
| 833787 | COG0328 | NA | NA | Clostridiales |
| 833925 | COG0841 | NA | NA | Bacteroides |
| 834204 | COG1052 | K03778 | map00620 | Clostridium phytofermentans |
| 834225 | COG0671 | NA | NA | Faecalibacterium prausnitzii |
| 834606 | COG0499 | NA | NA | cellular organisms |
| 834613 | NA | NA | NA | — |
| 834703 | NA | NA | NA | — |
| 834818 | NOG13134 | NA | NA | Faecalibacterium prausnitzii |
| 835107 | COG1396 | NA | NA | Clostridium |
| 835438 | COG1126 | K02028 | map02010 | Clostridium |
| 835458 | COG0459 | K04077 | NA | Clostridium methylpentosum |
| 836015 | NA | NA | NA | Clostridium leptum |
| 836097 | COG1269 | NA | NA | Clostridium hiranonis |
| 836212 | NA | NA | NA | Eubacterium ventriosum |
| 836262 | COG1193 | NA | NA | Faecalibacterium prausnitzii |
| 836651 | COG1010 | K05934 | map00860 | — |
| 836682 | NA | NA | NA | Alistipes putredinis |
| 836735 | COG0406 | K01834 | map00010 | Clostridium leptum |
| 836767 | COG2217 | NA | NA | Eubacterium siraeum |
| 837316 | COG0012 | NA | NA | Roseburia inulinivorans |
| 837359 | NA | NA | NA | Trichomonas vaginalis |
| 837728 | COG1199 | NA | NA | Faecalibacterium prausnitzii |
| 837740 | NA | NA | NA | — |
| 838374 | COG1473 | K01302 | NA | Faecalibacterium prausnitzii |
| 838524 | COG1274 | NA | NA | Anaerotruncus colihominis |
| 838525 | COG0460 | K00003 | map00260 | Bacteria |
| 838528 | COG5427 | NA | NA | Ruminococcus obeum |
| 838721 | inNOG06326 | NA | NA | — |
| 839454 | COG4905 | NA | NA | Faecalibacterium prausnitzii |
| 839475 | COG3250 | K01190 | map00052 | Caulobacter |
| 839558 | NA | NA | NA | — |
| 839671 | COG0481 | K03596 | NA | Eubacterium siraeum |
| 839772 | COG1316 | NA | NA | Clostridia |
| 839773 | COG1713 | K00969 | map00760 | Clostridium acetobutylicum |
| 839849 | COG3664 | K01198 | map00500 | — |
| 840036 | COG0301 | K03151 | NA | Bacteria |
| 840300 | COG0220 | K03439 | NA | Lactobacillus |
| 840950 | COG0188 | NA | NA | Ruminococcus obeum |
| 841058 | COG4660 | K03613 | NA | Bacteria |
| 841336 | COG1454 | K00048 | map00620 | Clostridiales |
| 841501 | COG1475 | NA | NA | Faecalibacterium prausnitzii |
| 841687 | NA | NA | NA | — |
| 841753 | COG0151 | K01945 | map00230 | — |
| 842017 | COG0116 | K07444 | NA | Clostridium leptum |
| 842122 | COG0550 | NA | NA | Bacteroides capillosus |
| 842614 | NA | NA | NA | Alistipes putredinis |
| 842632 | NOG08575 | K06012 | NA | Faecalibacterium prausnitzii |
| 842665 | COG2002 | K06284 | NA | Clostridia |
| 842686 | NA | NA | NA | Gramella forsetii |
| 842874 | COG0768 | NA | NA | Faecalibacterium prausnitzii |
| 844031 | COG0206 | K03531 | NA | Clostridiales |
| 844100 | COG0500 | K00599 | map00150 | Clostridium thermocellum |
| 844355 | COG1027 | K01744 | map00252 | Clostridium |
| 844356 | COG3968 | NA | NA | Ruminococcus torques |
| 844453 | NA | NA | NA | — |
| 845074 | COG0673 | NA | NA | Elusimicrobium minutum |
| 845221 | COG0673 | K00010 | map00031 | — |
| 845450 | NOG23148 | NA | NA | Clostridiales |
| 846226 | COG0474 | NA | NA | Alkaliphilus oremlandii |
| 846787 | COG0577 | NA | NA | Clostridium scindens |
| 847523 | COG0242 | K01462 | NA | Clostridiales |
| 847584 | NA | NA | NA | — |
| 848434 | COG0842 | NA | NA | Roseburia inulinivorans |
| 848669 | COG3595 | NA | NA | Coprococcus eutactus |
| 849537 | COG1066 | K04485 | NA | Clostridium methylpentosum |
| 850244 | COG1195 | NA | NA | Bacteroides capillosus |
| 851009 | COG0571 | K03685 | NA | Desulfococcus oleovorans |
| 851397 | COG0474 | K01529 | map00790 | Alkaliphilus oremlandii |
| 851657 | COG3225 | NA | NA | Clostridia |
| 852404 | NA | NA | NA | Lactobacillus delbrueckii |
| 852468 | NOG16527 | NA | NA | Bacteria |
| 854401 | NA | NA | NA | — |
| 854796 | COG4468 | K00964 | map00052 | Clostridium |
| 855213 | COG3250 | K01190 | map00052 | Clostridium |
| 855302 | NA | NA | NA | Clostridium methylpentosum |
| 857096 | COG2017 | K01785 | map00010 | Clostridium phytofermentans |
| 857138 | COG2207 | K02099 | NA | Clostridium |
| 857370 | COG3250 | K01190 | map00052 | Roseburia inulinivorans |
| 858607 | COG1766 | NA | NA | Bacteroides pectinophilus |
| 859820 | COG0064 | NA | NA | Clostridiales |
| 859950 | COG2211 | K03292 | NA | Clostridium |
| 859951 | COG3250 | K01190 | map00052 | Clostridium |
| 860475 | COG0530 | K07301 | NA | Eubacterium hallii |
| 862083 | COG0188 | NA | NA | Clostridiales |
| 865365 | COG0060 | NA | NA | Bacteria |
| 865485 | COG0765 | K02029 | NA | Clostridium kluyveri |
| 865516 | COG0606 | K07391 | NA | Clostridium phytofermentans |
| 866708 | COG0414 | K01918 | map00410 | Eubacterium ventriosum |
| 868899 | COG4468 | K00964 | map00052 | Clostridium |
| 868900 | COG1087 | K01784 | map00052 | Clostridium |
| 868901 | COG1087 | K01784 | map00052 | Bacteria |
| 869383 | COG0642 | K10819 | NA | Clostridium phytofermentans |
| 870033 | COG0809 | K07568 | NA | Clostridiales |
| 870115 | COG0366 | NA | NA | Streptomyces griseus |
| 870661 | COG0172 | K01875 | map00260 | Eubacterium ventriosum |
| 870671 | COG0571 | K03685 | NA | Clostridium phytofermentans |
| 870965 | NA | NA | NA | Clostridium phytofermentans |
| 871372 | COG0840 | K03406 | NA | — |
| 871460 | COG2182 | K10108 | NA | — |
| 871577 | COG3894 | NA | NA | Desulfitobacterium hafniense |
| 872731 | COG2207 | K01198 | map00500 | — |
| 874171 | COG0334 | K00262 | map00251 | Bacteroides |
| 874355 | COG2017 | K01785 | map00010 | Bacteroides |
| 876282 | COG0046 | K01952 | map00230 | Bacteroides capillosus |
| 876821 | COG0845 | K03585 | NA | Bacteroides |
| 889374 | COG3451 | NA | NA | Bacteroides |
| 896511 | COG0078 | K00611 | map00220 | Faecalibacterium prausnitzii |
| 896614 | KOG2239 | NA | NA | — |
| 896936 | COG1883 | K01605 | map00640 | Alistipes putredinis |
| 897489 | NA | NA | NA | — |
| 898035 | NA | NA | NA | Lachnospiraceae |
| 899154 | NOG13698 | NA | NA | Bacteria |
| 899650 | COG0119 | K01649 | map00290 | Opitutus terrae |
| 900518 | COG1178 | NA | NA | Bacteria |
| 900813 | COG0138 | K00602 | map00230 | Bacteroides capillosus |
| 901388 | COG0406 | NA | NA | Hyphomonas neptunium |
| 901806 | NA | NA | NA | Bacteroides intestinalis |
| 902420 | COG1033 | K07003 | NA | — |
| 904007 | NA | NA | NA | Clostridiales |
| 904792 | NA | NA | NA | — |
| 905909 | COG1132 | K06147 | NA | Bacteroides pectinophilus |
| 906112 | NA | NA | NA | — |
| 908294 | NA | NA | NA | — |
| 912704 | COG1373 | K07133 | NA | — |
| 915416 | COG0153 | K00849 | map00052 | Clostridium |
| 921992 | COG0745 | K02483 | NA | Clostridium nexile |
| 924353 | COG0137 | K01940 | map00220 | Clostridiales |
| 926510 | COG2755 | K01045 | map00363 | Faecalibacterium prausnitzii |
| 927762 | NA | NA | NA | — |
| 927763 | NA | NA | NA | — |
| 929559 | COG0318 | NA | NA | Clostridiales |
| 929923 | COG1686 | NA | NA | Faecalibacterium prausnitzii |
| 930053 | COG0765 | NA | NA | Faecalibacterium prausnitzii |
| 930728 | COG3968 | K01915 | map00251 | Firmicutes |
| 932117 | COG0841 | K03296 | NA | Faecalibacterium prausnitzii |
| 932464 | COG0587 | NA | NA | Bacteria |
| 933417 | COG3345 | NA | NA | Clostridiales |
| 934370 | COG0077 | NA | NA | Eubacterium siraeum |
| 935356 | COG0458 | K01955 | map00240 | Firmicutes |
| 936472 | COG1117 | K02036 | map02010 | Faecalibacterium prausnitzii |
| 936622 | NA | NA | NA | Alistipes putredinis |
| 938652 | COG0726 | NA | NA | Eubacterium siraeum |
| 939740 | COG0716 | NA | NA | Clostridium methylpentosum |
| 940643 | COG1968 | NA | NA | Eubacterium siraeum |
| 940817 | NA | NA | NA | Methanococcus maripaludis |
| 940884 | COG0726 | K01463 | NA | Eubacterium siraeum |
| 941318 | COG1847 | K06346 | NA | Eubacterium siraeum |
| 941772 | COG2972 | K07701 | map02020 | Faecalibacterium prausnitzii |
| 942695 | COG0159 | NA | NA | Clostridium leptum |
| 942777 | NA | NA | NA | Eubacterium siraeum |
| 943861 | COG0542 | K03695 | NA | Eubacterium siraeum |
| 943984 | COG1968 | K06153 | map00550 | Alistipes putredinis |
| 945128 | COG1028 | K00065 | map00040 | Clostridium |
| 945475 | COG3707 | K07183 | NA | Faecalibacterium prausnitzii |
| 946374 | COG0077 | K04093 | map00400 | Faecalibacterium prausnitzii |
| 949511 | NA | NA | NA | Eubacterium siraeum |
| 949649 | COG0009 | K07566 | NA | Eubacterium siraeum |
| 949751 | NOG21955 | NA | NA | Eubacterium siraeum |
| 950385 | NA | NA | NA | — |
| 951511 | COG1589 | NA | NA | Eubacterium siraeum |
| 953454 | NA | NA | NA | — |
| 954390 | COG0725 | K02020 | NA | Clostridiales |
| 957601 | COG3209 | NA | NA | Bacteroides |
| 967219 | NA | NA | NA | — |
| 971723 | COG0291 | K02916 | NA | Gloeobacter violaceus |
| 971738 | COG3291 | K01448 | map00550 | Trichomonas vaginalis |
| 973942 | NOG16846 | NA | NA | Roseburia inulinivorans |
| 976902 | COG0687 | K11069 | NA | — |
| 978507 | COG0049 | K02992 | NA | Anaerotruncus colihominis |
| 978945 | COG0268 | K02968 | NA | Clostridium |
| 979183 | NA | NA | NA | — |
| 980554 | COG1866 | K01610 | map00020 | Bacteria |
| 981538 | NA | NA | NA | Anaerofustis stercorihominis |
| 981673 | NA | NA | NA | — |
| 983563 | NA | NA | NA | — |
| 983987 | COG1653 | NA | NA | Bifidobacterium adolescentis |
| 984264 | COG1027 | K01679 | map00020 | cellular organisms |
| 984807 | COG0012 | K06942 | NA | Clostridium thermocellum |
| 984813 | COG0042 | K05544 | NA | Schizosaccharomyces |
| 985573 | NA | NA | NA | — |
| 985686 | COG0593 | K02313 | NA | Clostridium |
| 986573 | NA | NA | NA | — |
| 986887 | NA | NA | NA | — |
| 987369 | COG2357 | K00951 | map00230 | Clostridiales |
| 987573 | COG1396 | K00517 | NA | Clostridiales |
| 987749 | NA | NA | NA | — |
| 987869 | COG0652 | K01802 | NA | Eukaryota |
| 988131 | NA | NA | NA | — |
| 988239 | NA | NA | NA | — |
| 988624 | COG1190 | K04567 | map00300 | Bacteroides capillosus |
| 988901 | NA | NA | NA | — |
| 988992 | NA | NA | NA | Bacteroides capillosus |
| 990803 | NA | NA | NA | — |
| 991371 | NA | NA | NA | — |
| 992093 | NA | NA | NA | — |
| 993022 | NA | NA | NA | Lentisphaera araneosa |
| 993023 | NA | NA | NA | root |
| 993676 | COG0357 | K03501 | NA | Firmicutes |
| 994346 | COG0515 | K03083 | map04012 | Eukaryota |
| 994514 | COG1293 | NA | NA | Clostridium thermocellum |
| 994675 | COG1164 | K08602 | NA | Thermoanaerobacter |
| 994879 | NA | NA | NA | — |
| 995248 | COG0187 | K02470 | NA | Carboxydothermus hydrogenoformans |
| 995319 | COG1940 | K00845 | map00010 | Bacteria |
| 995630 | NOG23158 | NA | NA | Ruminococcus torques |
| 997271 | NA | NA | NA | — |
| 998136 | NOG16854 | NA | NA | Clostridium bolteae |
| 999609 | COG0258 | K02335 | map00230 | Ruminococcus gnavus |
| 1000035 | COG0612 | K01422 | NA | Clostridium |
| 1000135 | COG2147 | K02885 | NA | Insecta |
| 1000173 | COG2088 | K06412 | NA | Bacteria |
| 1000414 | COG0543 | K00528 | NA | Eubacterium dolichum |
| 1000839 | COG1175 | K02025 | NA | Bacteria |
| 1000930 | NA | NA | NA | — |
| 1003010 | COG2273 | K01199 | map00500 | Clostridium |
| 1003309 | NA | K06147 | NA | Faecalibacterium prausnitzii |
| 1003735 | COG1838 | K01676 | map00020 | Faecalibacterium prausnitzii |
| 1006216 | COG0863 | K00590 | NA | Geobacillus |
| 1007586 | COG1211 | K00991 | map00100 | Faecalibacterium prausnitzii |
| 1007857 | COG1288 | NA | NA | Clostridium |
| 1016289 | COG0085 | K03043 | map03020 | Clostridiales |
| 1020717 | NOG11062 | NA | NA | Roseburia inulinivorans |
| 1022607 | NOG09722 | NA | NA | Clostridium |
| 1025105 | COG3481 | K03698 | NA | Clostridium |
| 1025287 | COG0855 | K00937 | map00190 | — |
| 1026485 | COG4585 | K07778 | map02020 | Clostridium |
| 1027655 | COG0766 | K00790 | map00530 | Clostridium |
| 1029915 | COG0366 | K01187 | map00052 | Clostridium asparagiforme |
| 1031162 | COG0473 | K00031 | map00020 | Clostridium asparagiforme |
| 1031793 | COG0642 | K02489 | map02020 | Clostridiales |
| 1032957 | COG2337 | K07171 | NA | Faecalibacterium prausnitzii |
| 1036305 | COG0444 | K02031 | NA | Lysinibacillus sphaericus |
| 1038549 | COG0642 | K07636 | map02020 | Faecalibacterium prausnitzii |
| 1038782 | COG0210 | K03657 | map03420 | Faecalibacterium prausnitzii |
| 1039604 | NA | NA | NA | Faecalibacterium prausnitzii |
| 1039739 | NA | NA | NA | Faecalibacterium prausnitzii |
| 1044361 | COG2309 | K01255 | map00480 | Faecalibacterium prausnitzii |
| 1074801 | COG0187 | K02470 | NA | Clostridium bolteae |
| 1078399 | COG1961 | K06400 | NA | Syntrophomonas wolfei |
| 1078918 | COG0488 | K06158 | NA | Firmicutes |
| 1079333 | COG1744 | K02058 | NA | — |
| 1083008 | NA | NA | NA | — |
| 1083232 | COG2316 | K06951 | NA | Ruminococcus lactaris |
| 1087413 | COG4868 | NA | NA | Roseburia inulinivorans |
| 1090984 | NA | NA | NA | Eubacterium siraeum |
| 1091819 | NA | NA | NA | Clostridium hylemonae |
| 1093507 | COG1033 | K07003 | NA | Clostridiales |
| 1093508 | NA | NA | NA | Eubacterium siraeum |
| 1095878 | NA | NA | NA | Eubacterium siraeum |
| 1096559 | COG1136 | K02003 | NA | Eubacterium siraeum |
| 1098186 | NA | NA | NA | — |
| 1098187 | NA | NA | NA | — |
| 1098885 | COG2344 | K01926 | NA | Eubacterium siraeum |
| 1099121 | COG0488 | K06158 | NA | Bacteroides capillosus |
| 1099229 | NA | NA | NA | Butyrivibrio |
| 1099254 | NA | NA | NA | — |
| 1099472 | NA | NA | NA | — |
| 1100532 | COG3291 | K01448 | map00550 | Trichomonas vaginalis |
| 1101927 | COG1570 | K03601 | map03430 | Bacteroides capillosus |
| 1102135 | NA | NA | NA | Eubacterium siraeum |
| 1102690 | COG0596 | K01512 | map00010 | Eubacterium siraeum |
| 1104248 | COG0331 | K00645 | map00061 | Bacteria |
| 1104317 | COG3344 | K00986 | NA | Clostridium asparagiforme |
| 1105204 | NA | NA | NA | — |
| 1105612 | NA | NA | NA | Eubacterium siraeum |
| 1105670 | NA | NA | NA | Clostridium thermocellum |
| 1106098 | NOG09002 | NA | NA | Desulfitobacterium hafniense |
| 1106099 | NA | NA | NA | Desulfitobacterium hafniense |
| 1106100 | COG1961 | NA | NA | Bacteria |
| 1106101 | COG1396 | NA | NA | Clostridiales |
| 1106350 | NA | NA | NA | Eubacterium siraeum |
| 1106429 | NA | NA | NA | — |
| 1108588 | NOG04984 | K05970 | NA | Eubacterium siraeum |
| 1131337 | NA | NA | NA | — |
| 1146993 | COG0210 | K03657 | map03420 | Bacteroides capillosus |
| 1148840 | NA | NA | NA | — |
| 1153439 | NA | NA | NA | Ruminococcus lactaris |
| 1184191 | NA | K10188 | NA | — |
| 1184764 | NA | NA | NA | Clostridium |
| 1184821 | NA | NA | NA | — |
| 1184822 | NA | NA | NA | — |
| 1187141 | COG0256 | K02881 | NA | Clostridiales |
| 1189828 | COG0514 | K03654 | NA | Clostridiales |
| 1190815 | NA | NA | NA | — |
| 1196411 | COG4660 | K03613 | NA | Clostridium bolteae |
| 1233375 | COG1117 | K02036 | map02010 | Eubacterium siraeum |
| 1235445 | COG3533 | K09955 | NA | Eubacterium siraeum |
| 1235565 | KOG4726 | K03613 | NA | Faecalibacterium prausnitzii |
| 1235844 | COG0366 | K01200 | NA | Eubacterium siraeum |
| 1236828 | COG4146 | K03307 | NA | Bacteroides |
| 1237309 | COG0758 | K04096 | NA | Eubacterium siraeum |
| 1237851 | COG3468 | NA | NA | Eubacterium siraeum |
| 1237977 | COG0703 | K00891 | map00400 | Eubacterium siraeum |
| 1238964 | COG0205 | K00850 | map00010 | Eubacterium siraeum |
| 1239044 | COG4485 | NA | NA | Eubacterium siraeum |
| 1239386 | COG2730 | K01179 | map00500 | Eubacterium siraeum |
| 1239545 | NOG21901 | NA | NA | Faecalibacterium prausnitzii |
| 1239552 | COG1181 | K01921 | map00473 | Eubacterium siraeum |
| 1240796 | COG0210 | K01529 | map00790 | Eubacterium siraeum |
| 1241551 | NA | NA | NA | Eubacterium siraeum |
| 1243154 | NA | NA | NA | — |
| 1243627 | NA | NA | NA | Faecalibacterium prausnitzii |
| 1244765 | COG0561 | K07024 | NA | Eubacterium siraeum |
| 1247386 | COG2145 | K00878 | map00730 | Eubacterium siraeum |
| 1247391 | NA | NA | NA | — |
| 1247646 | COG0341 | K03074 | NA | Eubacterium siraeum |
| 1247895 | COG4912 | NA | NA | Eubacterium siraeum |
| 1248773 | NA | NA | NA | — |
| 1248778 | NA | NA | NA | Eubacterium biforme |
| 1249002 | NA | NA | NA | Eubacterium siraeum |
| 1249004 | COG0840 | K03406 | NA | Bacteria |
| 1249264 | NA | NA | NA | Faecalibacterium prausnitzii |
| 1249351 | COG4422 | NA | NA | Eubacterium siraeum |
| 1249680 | COG3757 | K01448 | map00550 | Eubacterium siraeum |
| 1258139 | NA | NA | NA | Bacteria |
| 1261624 | NA | NA | NA | — |
| 1262548 | NA | NA | NA | Bacteria |
| 1262550 | COG1309 | NA | NA | Bifidobacterium dentium |
| 1262551 | COG1063 | K00060 | map00051 | Eubacterium biforme |
| 1262955 | COG2003 | K03630 | NA | Bacteroides pectinophilus |
| 1263369 | NA | NA | NA | Eubacterium siraeum |
| 1263370 | NA | NA | NA | — |
| 1263621 | NA | NA | NA | — |
| 1263641 | COG1653 | K10117 | NA | Eubacterium hallii |
| 1264797 | COG5505 | NA | NA | Alkaliphilus oremlandii |
| 1265580 | NA | NA | NA | — |
| 1265583 | COG1132 | K06147 | map02010 | Eubacterium siraeum |
| 1265698 | NA | NA | NA | root |
| 1266195 | NA | NA | NA | Clostridiales |
| 1266545 | COG0732 | K01154 | NA | Bacteroides plebeius |
| 1266570 | NA | NA | NA | — |
| 1270329 | NA | NA | NA | — |
| 1270827 | COG0353 | K06187 | NA | Roseburia inulinivorans |
| 1270940 | NA | NA | NA | Bacteroides pectinophilus |
| 1271198 | NOG13858 | NA | NA | Bacteria |
| 1271641 | COG0166 | K01810 | map00010 | Ruminococcus lactaris |
| 1273216 | COG1887 | K00703 | map00500 | Clostridium phytofermentans |
| 1273610 | COG5295 | NA | NA | — |
| 1281776 | COG0458 | K01955 | map00240 | Bacteria |
| 1299082 | COG0706 | K03217 | NA | Bordetella |
| 1299347 | COG1185 | K00962 | map00230 | Burkholderia |
| 1301623 | NA | NA | NA | — |
| 1302090 | COG0842 | K01992 | NA | Clostridium kluyveri |
| 1303020 | COG1882 | K00656 | map00620 | Bacteroides |
| 1307816 | NA | NA | NA | Eubacterium siraeum |
| 1316237 | NA | NA | NA | Eubacterium biforme |
| 1320576 | NA | NA | NA | — |
| 1385412 | COG0546 | K01091 | map00630 | Eubacterium hallii |
| 1392436 | COG1185 | K00962 | map00230 | Bacteroides pectinophilus |
| 1397430 | COG0591 | K03307 | NA | Anaerofustis stercorihominis |
| 1404443 | COG2205 | K07646 | map02020 | Eubacterium hallii |
| 1420469 | COG1087 | K01784 | map00052 | Clostridium |
| 1429341 | COG2211 | K03292 | NA | Clostridiales |
| 1446590 | COG0129 | K01687 | map00290 | Bacteria |
| 1447147 | NA | K03737 | map00620 | Akkermansia muciniphila |
| 1447446 | COG0716 | K00536 | map00910 | Eubacterium siraeum |
| 1447685 | COG0144 | K03500 | NA | Akkermansia muciniphila |
| 1449123 | COG0195 | K02600 | NA | Akkermansia muciniphila |
| 1449526 | COG0438 | K08256 | NA | Akkermansia muciniphila |
| 1449696 | COG3604 | K02584 | NA | Bacteria |
| 1450020 | COG1586 | K01611 | map00220 | Eubacterium siraeum |
| 1450465 | NA | NA | NA | Eubacterium siraeum |
| 1451813 | COG2060 | K01546 | map02020 | Akkermansia muciniphila |
| 1451855 | COG0050 | K02358 | NA | Dictyoglomus thermophilum |
| 1453142 | COG0541 | K03106 | NA | Clostridiales |
| 1454732 | COG2165 | NA | NA | — |
| 1454745 | COG0238 | K02963 | NA | Eubacterium siraeum |
| 1455568 | COG0071 | K04080 | NA | Eubacterium siraeum |
| 1456520 | COG0610 | K01153 | NA | Bacteria |
| 1457133 | COG1385 | K09761 | NA | Eubacterium siraeum |
| 1457257 | NA | NA | NA | Eubacterium siraeum |
| 1457537 | NA | NA | NA | Eubacterium siraeum |
| 1457744 | NA | NA | NA | Eubacterium siraeum |
| 1457750 | COG0037 | K04075 | NA | Firmicutes |
| 1458327 | NOG18209 | NA | NA | Bacteria |
| 1458618 | COG0846 | K01463 | NA | Ruminococcus lactaris |
| 1459197 | NOG15851 | K03827 | NA | Eubacterium siraeum |
| 1459332 | NA | NA | NA | Eubacterium siraeum |
| 1459698 | COG0072 | K01890 | map00400 | Clostridiales |
| 1460511 | COG1092 | K06969 | NA | Eubacterium siraeum |
| 1460862 | NA | NA | NA | Eubacterium siraeum |
| 1461002 | COG4509 | K08600 | NA | Eubacterium siraeum |
| 1461903 | COG1883 | K01605 | map00640 | Eubacterium siraeum |
| 1461916 | NA | NA | NA | — |
| 1462425 | COG3583 | NA | NA | Eubacterium siraeum |
| 1462519 | COG0613 | K07053 | NA | Eubacterium siraeum |
| 1462920 | COG0172 | K01875 | map00260 | Eubacterium siraeum |
| 1462921 | COG1475 | K03497 | NA | Eubacterium siraeum |
| 1463003 | NA | NA | NA | Eubacterium siraeum |
| 1463106 | NA | NA | NA | Eubacterium siraeum |
| 1463747 | NA | NA | NA | Desulfitobacterium hafniense |
| 1463748 | NA | NA | NA | Bacteroides pectinophilus |
| 1464344 | COG4295 | NA | NA | Eubacterium siraeum |
| 1464542 | NA | NA | NA | — |
| 1465173 | COG0556 | K03702 | NA | Firmicutes |
| 1465346 | NA | NA | NA | — |
| 1465360 | COG1670 | K00676 | NA | Eubacterium siraeum |
| 1465670 | NA | NA | NA | — |
| 1465954 | NA | NA | NA | — |
| 1466726 | COG0050 | K02358 | NA | cellular organisms |
| 1468715 | NA | NA | NA | — |
| 1469426 | COG0087 | K02906 | NA | Synechococcus |
| 1469532 | NA | NA | NA | Bacteroides capillosus |
| 1470497 | COG0216 | K02835 | NA | Trichodesmium erythraeum |
| 1472235 | COG0711 | K02109 | map00190 | cellular organisms |
| 1473577 | COG3210 | NA | NA | Clostridium cellulolyticum |
| 1479330 | COG3299 | NA | NA | Enterobacteriaceae |
| 1479339 | NA | NA | NA | — |
| 1479340 | NA | NA | NA | — |
| 1485035 | COG3546 | K06334 | NA | Clostridium |
| 1485901 | COG0789 | NA | NA | Blautia hydrogenotrophica |
| 1493861 | NA | NA | NA | Clostridium |
| 1504786 | COG0480 | K02355 | NA | Bacteria |
| 1527181 | COG1475 | K03497 | NA | Clostridium |
| 1552172 | COG2262 | K03665 | NA | Faecalibacterium prausnitzii |
| 1554681 | NA | K06940 | NA | Faecalibacterium prausnitzii |
| 1554904 | COG0215 | K01883 | map00272 | Faecalibacterium prausnitzii |
| 1555087 | NA | K02027 | NA | Clostridium ramosum |
| 1555245 | COG1511 | K01421 | NA | Faecalibacterium prausnitzii |
| 1555832 | COG0492 | K00384 | map00240 | Faecalibacterium prausnitzii |
| 1556202 | NOG07807 | NA | NA | Faecalibacterium prausnitzii |
| 1556370 | COG2207 | K02099 | NA | Faecalibacterium prausnitzii |
| 1556372 | COG1126 | K10041 | map02010 | Clostridiales |
| 1556549 | COG0331 | K00645 | map00061 | Faecalibacterium prausnitzii |
| 1556775 | COG0749 | K02335 | map00230 | Faecalibacterium prausnitzii |
| 1556932 | NA | K03593 | NA | Clostridium leptum |
| 1558245 | COG0739 | NA | NA | Faecalibacterium prausnitzii |
| 1558722 | COG1104 | K04487 | map00730 | Faecalibacterium prausnitzii |
| 1559333 | NA | NA | NA | — |
| 1559501 | COG1196 | K03529 | NA | Faecalibacterium prausnitzii |
| 1560267 | NA | K02547 | NA | Clostridiales |
| 1561054 | COG0553 | K08282 | NA | Faecalibacterium prausnitzii |
| 1564417 | COG2017 | NA | NA | Faecalibacterium prausnitzii |
| 1565761 | COG0392 | K07027 | NA | Faecalibacterium prausnitzii |
| 1566124 | NA | NA | NA | Faecalibacterium prausnitzii |
| 1566504 | COG0428 | K07238 | NA | Faecalibacterium prausnitzii |
| 1566622 | NA | NA | NA | Faecalibacterium prausnitzii |
| 1567335 | COG0577 | K02004 | NA | Faecalibacterium prausnitzii |
| 1567939 | COG0449 | K00820 | map00251 | Faecalibacterium prausnitzii |
| 1570930 | NA | NA | NA | — |
| 1571266 | COG2082 | K06042 | map00860 | Faecalibacterium prausnitzii |
| 1572246 | COG1192 | K03496 | NA | Clostridium bolteae |
| 1572291 | NA | NA | NA | Faecalibacterium prausnitzii |
| 1575899 | NA | NA | NA | — |
| 1576240 | COG0653 | K03070 | NA | Faecalibacterium prausnitzii |
| 1586727 | COG1964 | K06937 | NA | Bacteria |
| 1589094 | NOG06133 | NA | NA | Clostridiales |
| 1592065 | COG1247 | NA | NA | Finegoldia magna |
| 1593101 | COG0372 | K01659 | map00640 | Faecalibacterium prausnitzii |
| 1593169 | COG1136 | K05685 | NA | Faecalibacterium prausnitzii |
| 1596989 | COG0703 | K00014 | map00400 | Faecalibacterium prausnitzii |
| 1597072 | COG1518 | NA | NA | Firmicutes |
| 1598739 | COG3857 | K01144 | NA | Faecalibacterium prausnitzii |
| 1601619 | COG0697 | K03298 | NA | Faecalibacterium prausnitzii |
| 1602210 | NA | NA | NA | Faecalibacterium prausnitzii |
| 1602941 | COG1132 | K06147 | NA | Bacteria |
| 1603763 | COG3394 | K03478 | NA | Synechococcus |
| 1610182 | NA | K02484 | NA | Bacteroides |
| 1612462 | NOG34819 | NA | NA | Bacteroides intestinalis |
| 1613471 | NA | NA | NA | — |
| 1613590 | NA | NA | NA | — |
| 1614067 | COG1175 | K10118 | NA | Streptococcus infantarius |
| 1615301 | COG0050 | K02358 | NA | Bacteria |
| 1617244 | NA | K03046 | map03020 | Clostridia |
| 1619505 | NA | K03324 | NA | Clostridiales |
| 1621790 | NA | K01507 | map00190 | Clostridium |
| 1624391 | NA | K09762 | NA | Clostridium asparagiforme |
| 1625788 | NA | K00688 | map00500 | Clostridium bolteae |
| 1626208 | COG0389 | K03502 | NA | Bacteria |
| 1626640 | COG1217 | K06207 | NA | Clostridiales |
| 1627407 | NA | NA | NA | Clostridium |
| 1627820 | COG1132 | K06147 | NA | Catenibacterium mitsuokai |
| 1628630 | NA | K02123 | map00190 | — |
| 1629280 | NA | K00088 | map00230 | Clostridium |
| 1629624 | NA | NA | NA | — |
| 1635112 | NA | NA | NA | — |
| 1639469 | COG0582 | K04763 | NA | Moorella thermoacetica |
| 1667205 | NA | NA | NA | — |
| 1675394 | NA | NA | NA | cellular organisms |
| 1680948 | COG0523 | K02234 | NA | Clostridium |
| 1683707 | NA | NA | NA | — |
| 1684336 | NA | NA | NA | — |
| 1688733 | COG0059 | K00053 | map00290 | Eubacterium siraeum |
| 1692792 | NA | NA | NA | Bacteroides pectinophilus |
| 1704961 | NA | NA | NA | — |
| 1706327 | NA | NA | NA | — |
| 1711948 | COG0556 | K03702 | NA | Bacteria |
| 1717525 | COG4962 | K02283 | NA | — |
| 1719136 | COG1894 | K00335 | map00130 | Clostridium scindens |
| 1727799 | COG0542 | K03697 | NA | Faecalibacterium prausnitzii |
| 1733925 | COG0264 | K02357 | NA | Bacteroides capillosus |
| 1736158 | COG4747 | NA | NA | Desulfatibacillum alkenivorans |
| 1749372 | COG0601 | K02033 | NA | Clostridium phytofermentans |
| 1751361 | COG0031 | K01738 | map00272 | Clostridium |
| 1751890 | NA | NA | NA | — |
| 1753439 | COG0274 | K01619 | map00030 | Clostridium |
| 1755262 | COG0494 | K01529 | map00790 | Nostocaceae |
| 1760276 | NA | NA | NA | — |
| 1762115 | COG0758 | K04096 | NA | Clostridiaceae |
| 1762189 | COG3279 | K02477 | NA | — |
| 1767918 | NA | K02337 | map03030 | Cyanobacteria |
| 1767998 | NA | NA | NA | — |
| 1768609 | COG1132 | K06147 | NA | Bacteroides capillosus |
| 1776073 | NA | NA | NA | Firmicutes |
| 1781621 | NA | NA | NA | — |
| 1785115 | NA | NA | NA | Faecalibacterium prausnitzii |
| 1787956 | COG1939 | K11145 | NA | Clostridium |
| 1789280 | NA | NA | NA | — |
| 1796613 | COG0303 | K03750 | NA | Faecalibacterium prausnitzii |
| 1807503 | COG1087 | K01784 | map00052 | Faecalibacterium prausnitzii |
| 1816344 | NA | NA | NA | — |
| 1818912 | NA | NA | NA | Faecalibacterium prausnitzii |
| 1838715 | NA | NA | NA | — |
| 1843220 | NA | NA | NA | — |
| 1855833 | COG4496 | NA | NA | Clostridiales |
| 1863475 | COG0563 | K00939 | map00230 | Clostridium bolteae |
| 1882631 | COG0370 | K04759 | NA | Eubacterium siraeum |
| 1883327 | COG0463 | K00721 | map00510 | Bacteroides pectinophilus |
| 1883355 | COG0343 | K00773 | NA | Clostridiales |
| 1883368 | NA | NA | NA | Eubacterium hallii |
| 1883543 | COG0052 | K02967 | NA | Eubacterium siraeum |
| 1884025 | COG0845 | K02005 | NA | — |
| 1884423 | COG1219 | K03544 | NA | Eubacterium siraeum |
| 1885117 | COG1516 | K02422 | NA | Clostridium phytofermentans |
| 1890560 | NA | NA | NA | Clostridium |
| 1890808 | NA | NA | NA | Eubacterium ventriosum |
| 1891748 | COG0389 | K02346 | NA | Clostridiales |
| 1892260 | COG0546 | K01091 | map00630 | Clostridium bolteae |
| 1894475 | COG1190 | K04567 | map00300 | Clostridiales |
| 1898063 | NA | NA | NA | Syntrophomonas wolfei |
| 1902038 | COG2207 | K07471 | NA | Clostridium botulinum |
| 1902353 | COG0165 | K01755 | map00220 | Eubacterium siraeum |
| 1907099 | COG1299 | K02768 | map02060 | Firmicutes |
| 1910670 | NOG35098 | NA | NA | Bacteroides cellulosilyticus |
| 1917517 | COG1226 | K04878 | NA | Bacteroides |
| 1919046 | NA | NA | NA | — |
| 1919943 | NOG08575 | K06012 | NA | Clostridia |
| 1921986 | NA | NA | NA | Roseburia inulinivorans |
| 1926277 | COG4932 | NA | NA | Ruminococcus torques |
| 1926370 | COG0500 | K00551 | map00260 | Clostridiales |
| 1928977 | NA | NA | NA | Gammaproteobacteria |
| 1953014 | COG0582 | NA | NA | Anaerotruncus colihominis |
| 1961020 | NA | NA | NA | — |
| 1970307 | COG1066 | K04485 | NA | Bacteroides pectinophilus |
| 1970479 | NA | NA | NA | Bacteroides pectinophilus |
| 1970662 | COG0760 | K07533 | NA | Bacteroides pectinophilus |
| 1970785 | COG0463 | K00721 | map00510 | Syntrophomonas wolfei |
| 1970913 | COG0167 | K00226 | map00240 | Bacteria |
| 1971006 | NA | NA | NA | — |
| 1971147 | NA | NA | NA | Eubacterium siraeum |
| 1971187 | COG1561 | NA | NA | Bacteroides pectinophilus |
| 1971528 | COG4732 | K02006 | NA | Faecalibacterium prausnitzii |
| 1971589 | NA | NA | NA | — |
| 1971596 | COG0712 | K02113 | map00190 | Bacteria |
| 1971819 | COG4716 | K10254 | NA | Roseburia inulinivorans |
| 1972495 | COG3238 | K09936 | NA | Bacteroides pectinophilus |
| 1973327 | COG0557 | K01147 | NA | Bacteria |
| 1974286 | COG0131 | K01693 | map00340 | Roseburia inulinivorans |
| 1974432 | COG0250 | K02601 | NA | Clostridiales |
| 1974667 | NA | NA | NA | — |
| 1975680 | COG2081 | K07007 | NA | Bacteroides pectinophilus |
| 1976403 | COG0621 | K06168 | NA | Bacteria |
| 1976405 | COG0014 | K00147 | map00220 | Ruminococcus lactaris |
| 1978607 | COG0494 | K01554 | NA | Clostridiales |
| 1978613 | NA | NA | NA | Clostridium |
| 1978780 | COG0352 | NA | NA | Clostridium bartlettii |
| 1978829 | COG1846 | K03712 | NA | Bacteroides pectinophilus |
| 1980841 | COG0503 | K00759 | map00230 | Bacteroides pectinophilus |
| 1982069 | NA | NA | NA | Roseburia inulinivorans |
| 1982882 | COG0679 | K07088 | NA | Bacteroides pectinophilus |
| 1984223 | COG3291 | K01448 | map00550 | Eubacterium siraeum |
| 1984812 | NOG21910 | NA | NA | — |
| 1985066 | COG0784 | K03415 | NA | Bacteroides pectinophilus |
| 1990443 | COG3274 | NA | NA | Bacteria |
| 1991186 | COG0071 | NA | NA | Bacteroides uniformis |
| 1994013 | NA | NA | NA | — |
| 1995770 | NA | NA | NA | — |
| 2009592 | NA | NA | NA | Bacteroides uniformis |
| 2021040 | COG4166 | K02035 | NA | Clostridium butyricum |
| 2023697 | COG2848 | K09157 | NA | Clostridium leptum |
| 2031716 | COG0059 | K00053 | map00290 | Blautia hydrogenotrophica |
| 2046128 | COG0465 | K03798 | NA | Faecalibacterium prausnitzii |
| 2048454 | COG0534 | K03327 | NA | Blautia hydrogenotrophica |
| 2052703 | COG0601 | K02033 | NA | Clostridium bolteae |
| 2058943 | COG0466 | K01338 | NA | Firmicutes |
| 2074719 | COG0275 | K03438 | NA | Flavobacteria |
| 2079028 | COG0566 | K00599 | map00150 | Faecalibacterium prausnitzii |
| 2105782 | NOG24756 | NA | NA | Bacteroides |
| 2108301 | COG1961 | K06400 | NA | Heliobacterium modesticaldum |
| 2113638 | NA | NA | NA | — |
| 2113962 | NOG16497 | NA | NA | Bacteria |
| 2114333 | NA | NA | NA | — |
| 2114464 | COG1386 | K06024 | NA | Anaerostipes caccae |
| 2116380 | COG5368 | NA | NA | Fervidobacterium nodosum |
| 2116496 | NA | NA | NA | — |
| 2116828 | COG0221 | K01507 | map00190 | Clostridiales |
| 2117205 | COG0564 | K06180 | NA | Alistipes putredinis |
| 2125968 | NA | NA | NA | — |
| 2129464 | NA | NA | NA | — |
| 2129825 | NA | NA | NA | — |
| 2130465 | COG1136 | K02003 | NA | Clostridium |
| 2140646 | NA | NA | NA | — |
| 2149404 | COG0433 | K06915 | NA | Erwinia tasmaniensis |
| 2151597 | NA | NA | NA | Bacteroides pectinophilus |
| 2170295 | NA | NA | NA | — |
| 2175616 | COG4422 | NA | NA | Heliobacterium modesticaldum |
| 2184781 | COG0086 | K03046 | map03020 | Bacteroides pectinophilus |
| 2185209 | NA | NA | NA | — |
| 2196550 | NA | NA | NA | — |
| 2232932 | COG4283 | NA | NA | Clostridium nexile |
| 2236205 | NA | NA | NA | Clostridium |
| 2237516 | NOG16673 | K01238 | map00530 | Planctomycetaceae |
| 2237522 | NA | NA | NA | Parabacteroides distasonis |
| 2257924 | COG0745 | K07657 | NA | Clostridiales |
| 2258899 | COG1670 | K00676 | NA | Coprococcus comes |
| 2267893 | NA | NA | NA | — |
| 2270184 | COG2003 | K03630 | NA | Clostridia |
| 2274518 | NA | NA | NA | Eubacterium siraeum |
| 2275783 | NOG21673 | NA | NA | Clostridium phytofermentans |
| 2275807 | COG0197 | K02878 | NA | Synechococcus |
| 2277019 | NA | NA | NA | — |
| 2278234 | COG1702 | K06217 | NA | Faecalibacterium prausnitzii |
| 2278691 | COG2873 | K01740 | map00271 | Clostridiales |
| 2279669 | COG3279 | NA | NA | Faecalibacterium prausnitzii |
| 2282098 | COG0199 | K02954 | NA | Gloeobacter violaceus |
| 2283397 | COG4268 | NA | NA | cellular organisms |
| 2283545 | COG2217 | K01533 | NA | Ruminococcus obeum |
| 2283831 | COG4111 | K01529 | map00790 | Bacteroides pectinophilus |
| 2284460 | COG1940 | K02565 | NA | Coprococcus comes |
| 2285666 | NA | NA | NA | Coprococcus eutactus |
| 2285667 | NA | NA | NA | Coprococcus eutactus |
| 2286016 | COG0210 | K03657 | map03420 | Bacteria |
| 2286744 | NA | K03612 | NA | Clostridiales |
| 2287009 | COG0317 | K00951 | map00230 | Clostridium phytofermentans |
| 2287268 | NA | NA | NA | Clostridium |
| 2287915 | COG1132 | K06147 | NA | Clostridiales |
| 2288051 | COG0495 | K01869 | map00290 | Clostridium |
| 2288429 | NA | NA | NA | Clostridium |
| 2288670 | COG0371 | K02102 | NA | Clostridium |
| 2289046 | COG3335 | K07494 | NA | Ruminococcus gnavus |
| 2289205 | NA | NA | NA | Roseburia inulinivorans |
| 2289743 | COG1080 | K08483 | map02060 | Lachnospiraceae |
| 2289978 | NA | NA | NA | Dorea formicigenerans |
| 2291479 | COG1838 | K03780 | map00630 | Bacteroides pectinophilus |
| 2295529 | COG1207 | K07141 | NA | Clostridium |
| 2295537 | COG0153 | K00849 | map00052 | Clostridium |
| 2295746 | COG0168 | K03498 | NA | Clostridiales |
| 2295832 | COG1082 | NA | NA | Faecalibacterium prausnitzii |
| 2297335 | COG1131 | K01990 | NA | Clostridiales |
| 2298724 | COG0275 | K03438 | NA | Clostridiales |
| 2299043 | COG4938 | NA | NA | Bacteria |
| 2299726 | NOG34795 | NA | NA | Coprococcus comes |
| 2345433 | NA | NA | NA | — |
| 2345435 | COG0494 | K03574 | NA | — |
| 2345771 | COG1592 | K00532 | map00630 | Clostridiales |
| 2345904 | COG1132 | K06147 | NA | Clostridiales |
| 2345927 | COG0421 | K00797 | map00220 | Catenibacterium mitsuokai |
| 2346527 | NA | K03217 | NA | — |
| 2347115 | COG0733 | K03308 | NA | Eubacterium ventriosum |
| 2347973 | NA | NA | NA | — |
| 2348195 | COG2242 | K02191 | map00860 | — |
| 2348333 | COG4856 | NA | NA | Clostridiales |
| 2348835 | COG0860 | K01448 | map00550 | Ruminococcus lactaris |
| 2349040 | COG1613 | K02048 | NA | Bacteria |
| 2349417 | COG0281 | K00027 | map00620 | — |
| 2349561 | NA | NA | NA | — |
| 2350068 | COG0538 | K00031 | map00020 | — |
| 2350114 | NA | NA | NA | Coprococcus eutactus |
| 2350780 | COG1477 | K03734 | NA | Eubacterium hallii |
| 2351118 | NOG25815 | K01187 | map00052 | Bacteria |
| 2351464 | COG3887 | NA | NA | Ruminococcus obeum |
| 2351562 | NA | NA | NA | — |
| 2352545 | COG0351 | K00877 | map00730 | Clostridiales |
| 2352662 | NA | K07033 | NA | Lachnospiraceae |
| 2352693 | NA | NA | NA | — |
| 2353128 | COG3633 | K07862 | NA | Eubacterium hallii |
| 2353441 | NA | NA | NA | Clostridiales |
| 2353442 | NA | NA | NA | Clostridium cellulolyticum |
| 2353729 | COG1302 | NA | NA | Clostridium nexile |
| 2354373 | COG0722 | K01626 | map00400 | Ruminococcus obeum |
| 2354374 | NA | NA | NA | — |
| 2354720 | COG0569 | K03499 | NA | — |
| 2354764 | COG1132 | K06147 | NA | Bacteroides pectinophilus |
| 2354794 | COG0474 | K01529 | map00790 | Blautia hydrogenotrophica |
| 2355321 | NA | NA | NA | Roseburia inulinivorans |
| 2356009 | COG1951 | K03779 | map00630 | Bacteroides pectinophilus |
| 2356338 | COG0581 | K02038 | NA | Clostridium hylemonae |
| 2357787 | COG5001 | K02488 | NA | — |
| 2358117 | COG1982 | K01582 | map00220 | Catenibacterium mitsuokai |
| 2358284 | COG2239 | K06213 | NA | Dorea formicigenerans |
| 2358336 | NA | NA | NA | — |
| 2359154 | NA | NA | NA | — |
| 2359806 | NOG26452 | NA | NA | — |
| 2360397 | COG0368 | K02233 | map00860 | Roseburia inulinivorans |
| 2360552 | COG0165 | K01755 | map00220 | Clostridiales |
| 2360764 | COG0745 | K02483 | NA | Bacteroides pectinophilus |
| 2360905 | NA | NA | NA | — |
| 2361869 | COG1053 | K00394 | map00450 | Clostridiales |
| 2363295 | NA | NA | NA | Roseburia inulinivorans |
| 2363624 | COG0038 | K03281 | NA | Ruminococcus obeum |
| 2363649 | NA | NA | NA | Desulfitobacterium hafniense |
| 2364118 | NA | NA | NA | Eubacterium hallii |
| 2364714 | NOG08812 | NA | NA | — |
| 2368698 | COG0443 | K04043 | NA | — |
| 2371135 | COG4926 | NA | NA | Clostridium acetobutylicum |
| 2371698 | NA | NA | NA | — |
| 2373903 | NA | NA | NA | — |
| 2377078 | NA | NA | NA | Clostridium bolteae |
| 2388534 | NA | NA | NA | Bacteroides |
| 2390702 | NA | K03553 | NA | Bacteroides |
| 2391272 | COG0204 | K00655 | map00561 | Faecalibacterium prausnitzii |
| 2416715 | COG0086 | K03046 | map03020 | Bacteria |
| 2417405 | COG3250 | K01238 | map00530 | Bacteroides |
| 2417656 | COG0534 | K03327 | NA | Bacteroides cellulosilyticus |
| 2419417 | NA | NA | NA | — |
| 2419991 | COG0511 | K01960 | map00020 | Bacteroides |
| 2422713 | COG0514 | K03654 | NA | Bacteroides |
| 2429063 | COG1122 | K02006 | NA | Bacteroides capillosus |
| 2437460 | COG0249 | K03555 | NA | Bacteroides |
| 2440502 | NOG34575 | NA | NA | Bacteroides |
| 2441401 | NOG25022 | NA | NA | Bacteroides |
| 2448219 | COG0140 | K01496 | map00340 | Bacteroidales |
| 2452621 | COG0534 | K03327 | NA | Eubacterium siraeum |
| 2453007 | COG2337 | K07171 | NA | Eubacterium siraeum |
| 2453405 | COG0456 | K03826 | NA | Eubacterium siraeum |
| 2454577 | COG0304 | K09458 | map00061 | Eubacterium siraeum |
| 2454584 | COG1228 | K01468 | map00340 | Eubacterium siraeum |
| 2454587 | COG0219 | K03216 | NA | Eubacterium siraeum |
| 2454614 | NA | NA | NA | Eubacterium siraeum |
| 2454620 | NA | K02488 | NA | Eubacterium siraeum |
| 2455947 | COG2267 | K01048 | map00564 | Eubacterium siraeum |
| 2455952 | COG0249 | K03555 | NA | Eubacterium siraeum |
| 2456617 | COG1377 | K04061 | NA | Eubacterium siraeum |
| 2456618 | NA | NA | NA | Eubacterium siraeum |
| 2456780 | COG1766 | K02409 | NA | Eubacterium siraeum |
| 2456782 | COG1157 | K02412 | map02040 | Eubacterium siraeum |
| 2456789 | COG1776 | K02417 | NA | Eubacterium siraeum |
| 2456792 | COG1338 | K02419 | NA | Eubacterium siraeum |
| 2456795 | COG1377 | K02401 | NA | Eubacterium siraeum |
| 2456799 | COG4786 | K02392 | NA | Eubacterium siraeum |
| 2456801 | COG1871 | K03411 | map02030 | Eubacterium siraeum |
| 2457057 | COG0020 | K00806 | map00900 | Eubacterium siraeum |
| 2457060 | COG0821 | K03526 | map00100 | Eubacterium siraeum |
| 2457206 | NA | NA | NA | Eubacterium siraeum |
| 2457256 | COG0621 | K08070 | NA | Eubacterium siraeum |
| 2457257 | NA | NA | NA | Eubacterium siraeum |
| 2457261 | NA | NA | NA | Eubacterium siraeum |
| 2457595 | NOG21970 | NA | NA | Eubacterium siraeum |
| 2458384 | NA | NA | NA | Eubacterium siraeum |
| 2458514 | COG0712 | K02113 | map00190 | Eubacterium siraeum |
| 2458540 | COG0642 | K00936 | NA | Eubacterium siraeum |
| 2458604 | COG1136 | K02003 | NA | Eubacterium siraeum |
| 2458618 | COG0240 | K00057 | map00564 | Eubacterium siraeum |
| 2459196 | NA | NA | NA | Eubacterium siraeum |
| 2459198 | COG1397 | K01250 | NA | Eubacterium siraeum |
| 2459664 | NOG09637 | K01043 | NA | Eubacterium siraeum |
| 2460215 | COG0082 | K01736 | map00400 | Eubacterium siraeum |
| 2460216 | NA | NA | NA | Eubacterium siraeum |
| 2460219 | COG0124 | K01892 | map00340 | Eubacterium siraeum |
| 2460220 | COG2894 | K03609 | NA | Eubacterium siraeum |
| 2460225 | COG0826 | K08303 | map05120 | Eubacterium siraeum |
| 2460226 | NA | NA | NA | Eubacterium siraeum |
| 2460234 | COG0438 | K00754 | map00051 | Eubacterium siraeum |
| 2461916 | COG4509 | K08600 | NA | Eubacterium siraeum |
| 2461922 | COG3629 | NA | NA | Eubacterium siraeum |
| 2462163 | COG0582 | NA | NA | Roseburia inulinivorans |
| 2462512 | COG0365 | K01895 | map00010 | cellular organisms |
| 2462870 | COG0518 | K01951 | map00230 | Bacteria |
| 2462872 | NA | NA | NA | Eubacterium siraeum |
| 2462924 | COG1200 | K03655 | map03440 | Clostridiales |
| 2462929 | COG1522 | K03719 | NA | Eubacterium siraeum |
| 2463053 | COG0289 | K00215 | map00300 | Eubacterium siraeum |
| 2463057 | COG0343 | K00773 | NA | Eubacterium siraeum |
| 2463068 | COG1162 | K06949 | NA | Eubacterium siraeum |
| 2463229 | COG0002 | K00145 | map00220 | Eubacterium siraeum |
| 2463231 | COG0548 | K00930 | map00220 | Eubacterium siraeum |
| 2463234 | COG0053 | K03295 | NA | Eubacterium siraeum |
| 2463243 | NA | NA | NA | Ruminococcus lactaris |
| 2463387 | COG1219 | K03544 | NA | Eubacterium siraeum |
| 2463393 | COG0164 | K03470 | map03030 | Eubacterium siraeum |
| 2463486 | NA | NA | NA | Eubacterium siraeum |
| 2463493 | COG1394 | K02120 | map00190 | Eubacterium siraeum |
| 2463494 | NA | NA | NA | Eubacterium siraeum |
| 2463545 | COG0507 | K03581 | map03440 | Clostridiales |
| 2463561 | NA | NA | NA | Eubacterium siraeum |
| 2463563 | NA | NA | NA | Eubacterium siraeum |
| 2463872 | COG1482 | K01809 | map00051 | Eubacterium siraeum |
| 2464286 | NA | NA | NA | Eubacterium siraeum |
| 2464289 | NA | K00378 | NA | Eubacterium siraeum |
| 2464668 | COG1083 | K00983 | map00530 | Clostridium |
| 2464742 | COG0148 | K01689 | map00010 | Clostridiales |
| 2464744 | COG1696 | K00680 | map00350 | Eubacterium siraeum |
| 2464865 | COG0488 | K06020 | NA | Bacteria |
| 2465062 | COG1132 | K06147 | NA | Clostridiales |
| 2465063 | NA | NA | NA | Eubacterium siraeum |
| 2465248 | NA | NA | NA | Eubacterium siraeum |
| 2465384 | COG0438 | K00754 | map00051 | Eubacterium siraeum |
| 2465441 | COG1418 | K06950 | NA | Bacteria |
| 2465479 | NOG13976 | NA | NA | Eubacterium siraeum |
| 2465492 | COG1692 | K09769 | NA | Eubacterium siraeum |
| 2465497 | COG1963 | K09775 | NA | Eubacterium siraeum |
| 2465510 | NA | NA | NA | — |
| 2465515 | COG3411 | K00335 | map00130 | Eubacterium siraeum |
| 2465851 | COG0491 | K01069 | map00620 | Eubacterium siraeum |
| 2465861 | NA | NA | NA | Eubacterium siraeum |
| 2465862 | NA | NA | NA | Eubacterium siraeum |
| 2465867 | COG0733 | K03308 | NA | Clostridiales |
| 2465872 | COG0566 | K03437 | NA | Eubacterium siraeum |
| 2465873 | COG1206 | K04094 | NA | Eubacterium siraeum |
| 2465884 | COG0799 | K09710 | NA | Eubacterium siraeum |
| 2466012 | COG1132 | K06147 | NA | Eubacterium siraeum |
| 2466476 | COG2137 | K03565 | NA | Eubacterium siraeum |
| 2466481 | NA | NA | NA | Eubacterium siraeum |
| 2466512 | COG0234 | K04078 | NA | Eubacterium siraeum |
| 2466516 | COG1216 | K07011 | NA | Coprococcus eutactus |
| 2466519 | COG0463 | K00754 | map00051 | Eubacterium siraeum |
| 2466990 | COG1027 | K01744 | map00252 | Clostridium bartlettii |
| 2467037 | NA | NA | NA | — |
| 2467038 | NA | NA | NA | — |
| 2467046 | NA | NA | NA | — |
| 2467057 | COG0041 | K01588 | map00230 | Eubacterium siraeum |
| 2467752 | COG0698 | K01808 | map00030 | Eubacterium siraeum |
| 2467939 | COG1493 | K06023 | NA | Eubacterium siraeum |
| 2467945 | COG3935 | NA | NA | Eubacterium siraeum |
| 2467946 | COG1484 | K02315 | NA | Eubacterium siraeum |
| 2467989 | COG0245 | K00991 | map00100 | Eubacterium siraeum |
| 2468080 | NA | NA | NA | Eubacterium siraeum |
| 2468310 | COG0652 | K01802 | NA | Eubacterium siraeum |
| 2468311 | COG0652 | K01802 | NA | Eubacterium siraeum |
| 2468584 | COG2000 | K00533 | map00630 | Eubacterium siraeum |
| 2468682 | COG0428 | K07238 | NA | Eubacterium siraeum |
| 2468743 | COG4481 | NA | NA | Eubacterium siraeum |
| 2468838 | COG4100 | K01758 | map00260 | Eubacterium siraeum |
| 2468881 | COG0440 | K01653 | map00290 | Eubacterium siraeum |
| 2468882 | COG0028 | K01652 | map00290 | Clostridiales |
| 2469208 | COG0311 | K08681 | map00750 | Eubacterium siraeum |
| 2469269 | COG0704 | K02039 | NA | Eubacterium siraeum |
| 2469961 | COG0024 | K01265 | NA | Eubacterium siraeum |
| 2470527 | COG3201 | K03811 | NA | Eubacterium siraeum |
| 2470554 | COG1609 | K05499 | NA | Eubacterium siraeum |
| 2470563 | COG0494 | K01554 | NA | Eubacterium siraeum |
| 2470657 | COG1284 | NA | NA | Eubacterium siraeum |
| 2470658 | COG1939 | K11145 | NA | Eubacterium siraeum |
| 2470796 | COG0540 | K00609 | map00240 | Eubacterium siraeum |
| 2471706 | NA | K07052 | NA | Eubacterium siraeum |
| 2471750 | COG3250 | NA | NA | Clostridiales |
| 2471751 | NA | NA | NA | Eubacterium siraeum |
| 2471898 | COG2017 | K01785 | map00010 | Eubacterium siraeum |
| 2471899 | COG0474 | K01529 | map00790 | Bacteria |
| 2471924 | COG0389 | K02346 | NA | Eubacterium siraeum |
| 2472094 | COG0696 | K01834 | map00010 | Bacteria |
| 2472146 | NOG21937 | K00548 | map00271 | Eubacterium siraeum |
| 2472541 | NOG06161 | K06394 | NA | Eubacterium siraeum |
| 2472571 | COG1686 | K01286 | NA | Eubacterium siraeum |
| 2472574 | COG1386 | K06024 | NA | Eubacterium siraeum |
| 2472576 | COG0577 | K02004 | NA | Clostridium |
| 2472579 | COG1595 | K03088 | NA | Eubacterium siraeum |
| 2472598 | NA | NA | NA | Eubacterium siraeum |
| 2472697 | COG4905 | K06950 | NA | Eubacterium siraeum |
| 2472807 | COG1748 | K00290 | map00300 | Bacteria |
| 2472809 | COG5001 | NA | NA | Eubacterium siraeum |
| 2472906 | COG0546 | K01091 | map00630 | Eubacterium siraeum |
| 2472958 | COG1420 | K03705 | NA | Eubacterium siraeum |
| 2473100 | COG0265 | K01362 | NA | Eubacterium siraeum |
| 2473121 | COG3635 | K01834 | map00010 | Eubacterium siraeum |
| 2473157 | COG0220 | K03439 | NA | Eubacterium siraeum |
| 2473220 | NA | NA | NA | Eubacterium siraeum |
| 2473306 | COG1696 | K00680 | map00350 | Eubacterium siraeum |
| 2473365 | NA | NA | NA | Eubacterium siraeum |
| 2473510 | COG0769 | K01928 | map00300 | Eubacterium siraeum |
| 2473530 | COG3459 | K00754 | map00051 | Clostridiales |
| 2473746 | NA | NA | NA | Eubacterium siraeum |
| 2473748 | NA | NA | NA | Eubacterium siraeum |
| 2473756 | COG1132 | K06147 | NA | Eubacterium siraeum |
| 2473811 | COG3507 | K01198 | map00500 | Eubacterium siraeum |
| 2474002 | COG0122 | K03660 | NA | Eubacterium siraeum |
| 2474079 | COG1388 | NA | NA | Eubacterium siraeum |
| 2474081 | NOG09621 | NA | NA | Eubacterium siraeum |
| 2474086 | COG1328 | K00527 | map00230 | Bacteria |
| 2474090 | COG0813 | K03784 | map00230 | Eubacterium siraeum |
| 2474115 | COG0395 | K02026 | NA | Eubacterium siraeum |
| 2474124 | COG0793 | K03797 | NA | Eubacterium siraeum |
| 2474127 | COG2884 | K09812 | NA | Eubacterium siraeum |
| 2474221 | COG0600 | K02050 | NA | Eubacterium siraeum |
| 2474310 | COG3481 | NA | NA | Eubacterium siraeum |
| 2474316 | NOG08575 | K06012 | NA | Eubacterium siraeum |
| 2474365 | NA | NA | NA | Eubacterium siraeum |
| 2474371 | COG0726 | K01463 | NA | Eubacterium siraeum |
| 2474498 | NA | NA | NA | Eubacterium siraeum |
| 2474511 | NA | NA | NA | — |
| 2474613 | COG0038 | K03281 | NA | Eubacterium siraeum |
| 2474656 | NA | NA | NA | Eubacterium siraeum |
| 2474665 | NA | NA | NA | Eubacterium siraeum |
| 2474748 | COG0116 | K07444 | NA | Eubacterium siraeum |
| 2474837 | COG4894 | NA | NA | Eubacterium siraeum |
| 2474907 | NA | NA | NA | Eubacterium siraeum |
| 2474915 | COG1195 | K03629 | NA | Eubacterium siraeum |
| 2474917 | COG1451 | K07043 | NA | Eubacterium siraeum |
| 2474919 | NOG08375 | K01218 | map00051 | Eubacterium siraeum |
| 2474986 | COG1159 | K03595 | NA | Eubacterium siraeum |
| 2474991 | COG3314 | K02053 | NA | Eubacterium siraeum |
| 2475014 | NA | NA | NA | Eubacterium siraeum |
| 2477731 | NA | NA | NA | Eubacterium siraeum |
| 2477739 | COG0328 | K03469 | map03030 | Eubacterium siraeum |
| 2477876 | COG0494 | K01518 | map00230 | Eubacterium siraeum |
| 2477983 | NA | NA | NA | Clostridium leptum |
| 2478115 | COG1210 | K00963 | map00040 | Eubacterium siraeum |
| 2478163 | COG1737 | NA | NA | Eubacterium siraeum |
| 2478169 | COG0313 | K07056 | NA | Eubacterium siraeum |
| 2479705 | COG0103 | K02996 | NA | Bifidobacterium |
| 2501910 | COG1434 | K03748 | NA | Listeria |
| 2525616 | COG0150 | K01933 | map00230 | Eubacterium ventriosum |
| 2529256 | NA | NA | NA | Clostridium thermocellum |
| 2529598 | NA | NA | NA | — |
| 2537409 | NA | NA | NA | — |
| 2539499 | COG4708 | NA | NA | Clostridia |
| 2541787 | COG1175 | K02025 | NA | Faecalibacterium prausnitzii |
| 2544447 | NA | NA | NA | — |
| 2564507 | NA | K02014 | NA | Bacteroides |
| 2568292 | NA | K03321 | NA | Bacteroides |
| 2582519 | NA | NA | NA | Bacteroides pectinophilus |
| 2594366 | NOG14428 | NA | NA | — |
| 2628214 | COG3587 | K01156 | NA | Bacteroides capillosus |
| 2632187 | NA | NA | NA | — |
| 2633339 | COG1670 | K03790 | NA | Eubacterium biforme |
| 2634585 | COG0653 | K03070 | NA | Bacteroides capillosus |
| 2634594 | COG0182 | K08963 | map00271 | Clostridium tetani |
| 2634673 | COG0538 | K00031 | map00020 | — |
| 2635407 | COG1968 | K06153 | map00550 | Bacteroides capillosus |
| 2636230 | COG1109 | K01835 | map00010 | Bacteroides capillosus |
| 2637449 | COG1883 | K01572 | map00330 | Alistipes putredinis |
| 2639825 | COG1328 | K00527 | map00230 | Anaerostipes caccae |
| 2641942 | COG0745 | K07657 | NA | Clostridium |
| 2644831 | NA | NA | NA | — |
| 2645558 | COG1847 | K06346 | NA | Bacteroides capillosus |
| 2651546 | KOG4494 | K01511 | map00230 | Cryptosporidium |
| 2651799 | COG0542 | K03696 | NA | Bacteria |
| 2671057 | COG2848 | K09157 | NA | — |
| 2694475 | NA | NA | NA | Faecalibacterium prausnitzii |
| 2711042 | NA | NA | NA | Faecalibacterium prausnitzii |
| 2715919 | COG3973 | K01529 | map00790 | Atopobium rimae |
| 2716426 | COG2814 | K08156 | NA | Alistipes putredinis |
| 2748603 | COG5658 | NA | NA | Bacteroides pectinophilus |
| 2782815 | NOG07866 | K06438 | NA | Clostridium thermocellum |
| 2783253 | NA | NA | NA | Ruminococcus torques |
| 2792520 | NA | NA | NA | — |
| 2814936 | NA | NA | NA | Eubacterium siraeum |
| 2817698 | COG0768 | K08384 | NA | Anoxybacillus flavithermus |
| 2818142 | COG0272 | K01972 | map03030 | Clostridium bolteae |
| 2819291 | COG0635 | K02495 | map00860 | Clostridium cellulolyticum |
| 2820917 | COG0448 | K00975 | map00500 | Clostridiales |
| 2827561 | COG0475 | K03455 | NA | Firmicutes |
| 2827837 | COG1686 | K07258 | NA | Clostridium hylemonae |
| 2829342 | COG3191 | K01266 | NA | Brachyspira |
| 2829949 | NA | NA | NA | — |
| 2830322 | NA | K02335 | map00230 | Clostridium |
| 2835894 | COG0635 | K02495 | map00860 | Clostridium nexile |
| 2837148 | NOG21724 | NA | NA | Bacteria |
| 2838517 | COG1438 | K03402 | NA | Clostridium |
| 2838518 | COG0497 | K03631 | NA | Clostridium thermocellum |
| 2838861 | COG2183 | K06959 | NA | Bacteria |
| 2841034 | NOG22767 | K02014 | NA | Bacteroides |
| 2847376 | COG2207 | K02854 | NA | Opitutaceae |
| 2849498 | NA | NA | NA | — |
| 2849500 | NA | NA | NA | — |
| 2849709 | COG1288 | NA | NA | Clostridium |
| 2851283 | NA | NA | NA | — |
| 2855097 | COG0840 | K03406 | NA | Roseburia inulinivorans |
| 2859982 | NA | NA | NA | Eubacterium hallii |
| 2860802 | COG0183 | K00632 | map00071 | Heliobacterium modesticaldum |
| 2862330 | NA | NA | NA | Bacteria |
| 2869555 | NA | NA | NA | — |
| 2872829 | COG0569 | K03499 | NA | Eubacterium siraeum |
| 2873094 | COG0343 | K00773 | NA | Clostridium |
| 2875346 | COG0002 | K00145 | map00220 | Bacteroides capillosus |
| 2876416 | NA | NA | NA | — |
| 2884263 | NA | NA | NA | Clostridium scindens |
| 2884377 | NA | NA | NA | Ruminococcus lactaris |
| 2887016 | COG4656 | K03615 | NA | Clostridium botulinum |
| 2888058 | COG1208 | K00966 | map00051 | Clostridia |
| 2891219 | NA | NA | NA | — |
| 2891767 | COG3345 | K07407 | map00052 | Eubacterium siraeum |
| 2897923 | NA | NA | NA | Bacteria |
| 2898468 | NA | NA | NA | Eubacterium siraeum |
| 2898470 | COG2510 | K08978 | NA | Firmicutes |
| 2900944 | NA | NA | NA | — |
| 2903523 | COG0591 | K03307 | NA | — |
| 2907159 | NA | NA | NA | — |
| 2907797 | COG1961 | K06400 | NA | Bacteroides capillosus |
| 2910582 | COG1284 | NA | NA | Clostridium |
| 2914751 | COG3326 | K01175 | NA | Firmicutes |
| 2916000 | COG0060 | K01870 | map00290 | Anaerostipes caccae |
| 2919636 | COG0389 | K02346 | NA | Roseburia inulinivorans |
| 2921137 | COG0558 | K00995 | map00564 | Clostridium phytofermentans |
| 2922371 | NA | NA | NA | Clostridiales |
| 2924258 | NA | NA | NA | — |
| 2925517 | NA | K04096 | NA | Proteobacteria |
| 2926480 | NA | NA | NA | — |
| 2929649 | NA | NA | NA | — |
| 2929744 | COG0436 | K00821 | map00300 | Firmicutes |
| 2930117 | COG1092 | K06969 | NA | — |
| 2931216 | COG1387 | K04477 | NA | Dethiobacter alkaliphilus |
| 2934515 | NA | NA | NA | — |
| 2936469 | KOG2137 | K08819 | NA | Eukaryota |
| 2938639 | COG2723 | K05350 | map00460 | Halothermothrix orenii |
| 2941644 | COG1349 | K03436 | NA | Anaerocellum thermophilum |
| 2943789 | COG1472 | K05349 | map00460 | Clostridium butyricum |
| 2947471 | COG1459 | K02653 | NA | Clostridiales |
| 2947472 | COG1989 | K02654 | NA | Geobacter bemidjiensis |
| 2948722 | COG0024 | K01265 | NA | Clostridium |
| 2950758 | COG0250 | K02601 | NA | Clostridia |
| 2951031 | NA | NA | NA | — |
| 2951248 | NA | K00936 | NA | Coprococcus eutactus |
| 2954320 | NA | NA | NA | — |
| 2955125 | COG3103 | K01447 | map00550 | Roseburia inulinivorans |
| 2958543 | COG0469 | K00873 | map00010 | Bacteria |
| 2961294 | COG0338 | K06223 | map03430 | Anaerofustis stercorihominis |
| 2962201 | NA | NA | NA | Clostridium leptum |
| 2962272 | COG0395 | K02026 | NA | Xanthomonas |
| 2963844 | COG1198 | K04066 | map03440 | Thermoanaerobacter pseudethanolicus |
| 2964411 | NA | NA | NA | Mollicutes |
| 2965526 | NA | NA | NA | — |
| 2965664 | COG2720 | NA | NA | Moorella thermoacetica |
| 2965666 | NA | NA | NA | Clostridium phytofermentans |
| 2966637 | COG1354 | K05896 | NA | Bacteria |
| 2969494 | NA | K00527 | map00230 | Clostridiales |
| 2969688 | NA | NA | NA | Eubacterium ventriosum |
| 2971689 | COG1175 | K02025 | NA | Bacillus |
| 2972825 | COG0458 | K01955 | map00240 | cellular organisms |
| 2973080 | COG3857 | K01144 | NA | Clostridiaceae |
| 2973764 | COG0665 | K00100 | map00051 | Bacteria |
| 2975705 | COG1104 | K04487 | map00730 | Roseburia inulinivorans |
| 2975971 | NOG10993 | NA | NA | Anaerostipes caccae |
| 2976529 | COG4209 | K02025 | NA | Clostridium phytofermentans |
| 2979740 | COG0714 | K03924 | NA | Bacteria |
| 2980214 | NA | NA | NA | Clostridium |
| 2981160 | COG0786 | K03312 | NA | Bacteria |
| 2987047 | COG1882 | K00656 | map00620 | Clostridium |
| 2992081 | COG3314 | K02053 | NA | Alkaliphilus metalliredigens |
| 2993707 | COG0524 | K00852 | map00030 | Clostridium phytofermentans |
| 2997147 | COG1925 | K11184 | NA | Bacteria |
| 2998918 | COG1585 | NA | NA | Ruminococcus lactaris |
| 2999952 | NA | NA | NA | Actinobacteria (class) |
| 3003769 | COG1132 | K06147 | NA | Clostridiales |
| 3005166 | NA | NA | NA | Clostridium scindens |
| 3006342 | COG0149 | K01803 | map00010 | Clostridiales |
| 3008301 | COG1896 | K07023 | NA | Desulfitobacterium hafniense |
| 3008857 | COG0228 | K02959 | NA | Clostridia |
| 3009757 | COG1979 | K00100 | map00051 | Clostridium botulinum |
| 3010870 | NA | NA | NA | — |
| 3010935 | NA | NA | NA | Ruminococcus obeum |
| 3014465 | COG0534 | K03327 | NA | Clostridiales |
| 3015468 | COG0206 | K03531 | NA | Clostridiaceae |
| 3015673 | COG1961 | K06400 | NA | Heliobacterium modesticaldum |
| 3016755 | COG1217 | K06207 | NA | Clostridium methylpentosum |
| 3016769 | COG1175 | K02025 | NA | Firmicutes |
| 3019202 | NA | NA | NA | — |
| 3026023 | NA | NA | NA | — |
| 3026580 | COG0135 | K01817 | map00400 | Parabacteroides distasonis |
| 3028668 | COG0474 | K01552 | NA | Firmicutes |
| 3032089 | COG0217 | K00975 | map00500 | Clostridium thermocellum |
| 3032160 | COG0020 | K00806 | map00900 | Anaerostipes caccae |
| 3034076 | NA | NA | NA | Bacteroides capillosus |
| 3035293 | NOG16635 | NA | NA | Clostridium thermocellum |
| 3039344 | COG0366 | K01182 | map00052 | — |
| 3041109 | NA | NA | NA | Bacteroides capillosus |
| 3041567 | NA | NA | NA | — |
| 3041574 | NA | NA | NA | — |
| 3041736 | NA | NA | NA | Clostridium asparagiforme |
| 3042513 | COG1190 | K04567 | map00300 | Bacteroides capillosus |
| 3043564 | NA | NA | NA | — |
| 3048082 | NA | NA | NA | — |
| 3049520 | NA | NA | NA | — |
| 3055761 | COG1132 | K06147 | NA | Clostridiales |
| 3056613 | NA | NA | NA | Eubacterium hallii |
| 3060056 | NA | NA | NA | — |
| 3062402 | COG4769 | K00805 | map00100 | Coprococcus comes |
| 3063523 | COG2304 | K07114 | NA | Bacteria |
| 3073787 | COG1932 | K00831 | map00260 | Firmicutes |
| 3076195 | NA | NA | NA | Salmonella enterica |
| 3076698 | COG0546 | K01091 | map00190 | Firmicutes |
| 3077518 | COG1234 | K00784 | NA | Trichoplax |
| 3083605 | COG1074 | K01144 | map03440 | Bacteria |
| 3085232 | COG1564 | K00949 | map00730 | Clostridium phytofermentans |
| 3086484 | NA | NA | NA | Acholeplasma laidlawii |
| 3088158 | COG1521 | K03525 | map00770 | Firmicutes |
| 3089940 | NA | NA | NA | Clostridium |
| 3090704 | COG2155 | K09779 | NA | Clostridia |
| 3092252 | NA | NA | NA | — |
| 3095823 | COG1876 | K01286 | NA | Bacilli |
| 3101933 | COG0779 | K09748 | NA | — |
| 3103035 | COG0332 | K00648 | map00061 | — |
| 3106158 | COG2715 | K06373 | NA | Bacteria |
| 3106324 | NA | NA | NA | — |
| 3109891 | COG1760 | K01752 | map00260 | Clostridium |
| 3110058 | NA | K03272 | map00540 | Methylocella silvestris |
| 3113095 | COG0647 | K01101 | map00361 | cellular organisms |
| 3113468 | NA | NA | NA | — |
| 3114498 | COG1200 | K03655 | map03440 | Eubacterium dolichum |
| 3116845 | COG0601 | K02033 | NA | Firmicutes |
| 3119535 | COG1105 | K00882 | map00051 | Roseburia inulinivorans |
| 3121268 | COG2755 | K01045 | map00363 | Roseburia inulinivorans |
| 3122770 | COG0044 | K01465 | map00240 | Bacteria |
| 3125100 | COG0370 | K04759 | NA | Clostridium |
| 3125541 | NA | NA | NA | — |
| 3128094 | COG0793 | K03797 | NA | Faecalibacterium prausnitzii |
| 3129139 | COG0526 | K03671 | NA | Bacteria |
| 3131537 | COG1739 | K00560 | map00240 | Clostridium |
| 3134065 | NA | NA | NA | Eubacterium siraeum |
| 3142255 | COG1887 | K01005 | map00440 | Erysipelotrichaceae |
| 3143623 | COG4720 | NA | NA | Alkaliphilus oremlandii |
| 3144515 | NA | K06926 | NA | Firmicutes |
| 3145625 | NA | NA | NA | — |
| 3146945 | NA | NA | NA | — |
| 3147213 | COG1135 | K02071 | NA | Clostridiales |
| 3154733 | COG1349 | K03436 | NA | Bacillus |
| 3173038 | COG4175 | K02000 | map02010 | Clostridium hylemonae |
| 3175284 | NA | NA | NA | — |
| 3175391 | COG1024 | K01692 | map00071 | Clostridium beijerinckii |
| 3181255 | NA | NA | NA | — |
| 3192174 | NA | NA | NA | Desulfitobacterium hafniense |

1.-8. (canceled)

9. A method for diagnosing obesity, said method comprising determining whether at least one gene from Table 1 is absent from an individual's gut microbiome.

10. The method of claim 1, wherein at least 50% of the genes of Table 1 are absent from the said individual's gut microbiome.

11. The method of claim 1 wherein at least 75% of the genes of Table 1 are absent from the said individual's gut microbiome.

12. The method of claim 1 wherein at least 90% of the genes of Table 1 are absent from the said individual's gut microbiome.

13. The method of claim 1 wherein the at least one gene from Table 1 is a gene from Firmicutes.

14. The method of claim 1 comprising obtaining microbial DNA from faeces of the said individual.

15. A method for monitoring the efficacy of a treatment for obesity in a patient in need thereof comprising first determining whether at least one gene is absent from the said patient's microbiome, administering the treatment, and determining if the said at least one gene is present in the patient's microbiome after the treatment.

16. The method of claim 15 wherein at least 50% of the genes of Table 1 are absent from the said individual's gut microbiome before the treatment.

17. The method of claim 15 wherein at least 75% of the genes of Table 1 are absent from the said individual's gut microbiome before the treatment.

18. The method of claim 15 wherein at least 90% of the genes of Table 1 are absent from the said individual's gut microbiome before the treatment.

19. The method of claim 15 comprising at least one step of obtaining microbial DNA from faeces of the said individual.

20. A microarray comprising probes hybridizing to at least 10% of the genes of Table 1.

21. The microarray of claim 20 comprising probes hybridizing to at least 50% of the genes of Table 1.

22. The microarray of claim 20 comprising probes hybridizing to at least 95%, of the genes of Table 1.

23. The microarray of claim 20 comprising probes hybridizing to at least 97.5%, of the genes of Table 1.

24. The microarray of claim 20 comprising probes hybridizing to at least 99% of the genes of Table 1.

25. A kit for diagnosing obesity comprising a microarray of claim 20 or amplification primers specific for at least 10% of the genes of Table 1.

26. A kit for diagnosing obesity comprising a microarray of claim 21 or amplification primers specific for at least 50% of the genes of Table 1.

27. A kit for diagnosing obesity comprising a microarray of claim 22 or amplification primers specific for at least 95% of the genes of Table 1.

28. A kit for diagnosing obesity comprising a microarray of claim 24 or amplification primers specific for at least 99% of the genes of Table 1.

The application's sequence listing, which the Patent Office published only in electronic form, follows.

SEQUENCE LISTING (1326 sequences)

SEQ ID NO: 1 - DNA, 600 bp, Faecalibacterium prausnitzii
  misc_feature: SEQ ID N?6902
attcagcgcggactgaccaccagcagcacagccatttttgtgccctttaccacccaggaactttatcagtccgggcgggaatcgctgtactatggcctgaacgccctctccaacaaccttatcatggtggaccgcaagcggctcaagaaccccaatggcctgattctgggtacgcccggttctggcaaatccttctccgcaaagcgtgaaattaccaatgcttttctcgtgaccgatgatgatatcattgtctgcgacccggaggcagagtacgcaccccttgtggagcgtctgcatgggcagatcatctgcatcagtccggcaagtacccagtatatcaacccgctggacatcaacagcaattacagcgaggaagataatccgcttgccttgaaagcggactttattctttctctgtgcgagctggtggtgggtggcaaagaaggcctgctgccggtagaaaaaacagtcatcgaccgctgtgtacacctcatctaccgtaagtatttcgctgaccccgcgccggaaaatataccgctgctggaagacctgtacaatgccttgctgcagcaggatgaaaaagaagcccatcatgtagct

SEQ ID NO: 2 - DNA, 108 bp, Unknown
  BMI gene
  misc_feature: SEQ ID N?9549
ttggggtatggccaagcggtaaggcatcagactttgactctgacatgccctggttcgaatccaggtaccccagccatcgttgtcccgttagctcagttggtagagcac

SEQ ID NO: 3 - DNA, 102 bp, Unknown
  BMI gene
  misc_feature: SEQ ID N?10658
ttaggtgcacagcaaaccatttatgatttttcgtggcgggataagggcatcccccctgacagcattttacaggccggcagggtcttacaaaacgtgccgtaa

SEQ ID NO: 4 - DNA, 405 bp, Unknown
  BMI gene
  misc_feature: SEQ ID N?11041
atgcctacaattcagcaattagttagaaaaggaagggaaactttggtggaaaaaggtaaatcaccagcattggattcatgtcctcagagacgtggtgtttgtgttcgtgtttacactactacaccgaagaaacctaactcagcaatgcgtaaagtagcgagagtacgtttgacaaatggtaaagaagtaaactcttacattccaggtgaaggtcacaacttacaggaacactcaattgtgttagtacgtggtggtcgtgttaaggatcttccgggtgtacgttatcatattgttcgtggtactttggatactgctggagtgaatggtcgtacacagcgtcgttctaaatacggagctaagcgtccgaaaccaggatctgcacctgctgcaaaaggtaagaagtaa

SEQ ID NO: 5 - DNA, 768 bp, Eubacterium ventriosum
  misc_feature: SEQ ID N?11459
atgaaattaatatcatggaatgtaaatggattaagagcagttgtaaataaaggatttaaagaattttttaaagaaatagatgcagatatattttgtattcaagaaactaaaatgcaagaagcacagttagatgaaaatattttagaaatatttgaaggctataatgcttattggaatagtgcagagaaaaagggatattctggtacagcaatttttactaaacaaaaacctttaaatgtaacttatggaattggaaaagaagagcatgataaagagggaagagtaataacattagaattcgagaaattttatatggtaaatatttatactccaaattcaaaaagggaattagaaagattagattatagacaactatgggaagatgaaatacgagcatatttactaaaattaaaggagaataaatcagttgtaatgtgtggggatctaaatgttgcccatactgaaatagacttaaaaaatccaaagacaaatagaaaaaatgccggatttacagatgaagaaagagcaaaaatgacagaacttttaaatgcaggttttgtagatacatttagatataagtatccagaagtagaaggaaaatatagttggtggtcatatatgtttcatgccagagaaaaaaatgcaggctggagaatagattattttatagtttcagaaaatttaaaagataaaatagaagatgcaaaaattttagatgatatttatggaagtgaccattgtccggtagaattggacttgaatatttaa

SEQ ID NO: 6 - DNA, 342 bp, Unknown
  BMI gene
  misc_feature: SEQ ID N?12798
atgagaaacagcctgcaaaggaggagcttcaacatgaaaaacgccctgcgcatcagcctattgctgatcgcccttctctttctcctcgcgtggcgcttcgcgcccgcgcggcaagcgtcggacgagccggagccgtccggcgaggtgcggcgtcccgatgccgcggtgcccgaccatacgcgcacgctgcgcgtgctgcacggcggcgcggtcgaggagatgacgatggacgaatacctcctcggcgtgctgcgcgcggagatgcccgcctcgttcgagcttgaggcgctcaaggcgcaggcgggcgcccccgggtcccccagcctgtacgcccacatgagc

SEQ ID NO: 7 - DNA, 288 bp, Alistipes putredinis
  misc_feature: SEQ ID N?13291
aaggcactggcatttgtggagttgttttttgatccgcctcattcttccgaacgttgggttgatgatgaattggatccttgtgcccgttactcgtttttcgatcctatgaccgaaacgcagcgcggcacgccgcgcgaccagtcggcgtgggtgctcgaagaattccccgaccgcccgaatgccgtacgttggacttaccggattacggaaggagaatacgaggaggccgtgcgtcagacgctcgaacgctgggcagaccgggacgaggaagagaaggaatgtgtatga

SEQ ID NO: 8 - DNA, 183 bp, Unknown
  BMI gene
  misc_feature: SEQ ID N?14497
gtgctgagcctgaaaaattttatagaactcaccgtttcgatcttgattttttttgaaggctatgctatagtaatattcgttccgcaacgtgacagattcggagcggataagaaaatacgcgggagtagttcagtggtagagcgtcagcttcccaagctgaatgtcgcgggttcgaatcccgtt

SEQ ID NO: 9 - DNA, 351 bp, Clostridium leptum
  misc_feature: SEQ ID N?15094
atccggggatacggcggtatctttgtcagcgctactcaaaacacgatggactactttgctctgcgggacggcaaattcggcgacgcgatcctgaacaacagccgctttaagctgctgctccagatggaggagccggaggcccgcaagctccaggaaaagctcgggctgtcggaggaagaagtcacgcagattgtccggtgcggccggggccaggggctgctctgcgccgggaaaagccggatctgtgtggagattcgtgcctcccagttggaatatgacctgattaccaccaaccgggccgatctggaaaagcgggaaatcagggaagcggcgggaacggaagaagagtga

SEQ ID NO: 10 - DNA, 753 bp, Unknown
  BMI gene
  misc_feature: SEQ ID N?16910
ctggtgctggaggcggcctccaccagcaataatcagttctggatccttggcggcggcagcggctacaccctgcagaatgtgggcaccaagcagtatgtgaccgtgacggtgaccagtgcggatgtcacagcggacggccagaacagggatgacctgattgccgcgaagctggtcgagatcagtaagggcattaccgaggatggtcagtataccagcgagttggcgaacgactttggtactcggctggagacaaaactgaatgatctgttcgaggcgagcatcgaaggcaagtcggaggaggactataccgaggagataaaggataagcttgccagcgagggcatgaaggacgaggatataaatgcccttatcaaaaagctaagcagtgatgacgaaaacgtatcctttacagaggaggaaatcctgcttcttgtggaggtgcttaccggcaagtcacttgaggatattacggtggaagtcgtgggggagatggtcgacgaggacctgaaaaacaatcccaccaccaccgtcaccacctacacggtggggatgacggacgccagcgacaaggcggcgcggtgggcgctgaacaaggccaccggtaaagatgcgtggacgctgaccggcctgttctatcccggctacaaggatagcgacggtatcggcgggggggtctccccttgtttttcccggggggactcccccctcccccgggggagaggccgctgtattagcctgtactcaacagaatca

SEQ ID NO: 11 - DNA, 861 bp, Alistipes putredinis
  misc_feature: SEQ ID N?19436
cgccgtcagcagcagatcgtcttccgccggctggcggccgacgcgctcacggcgccgcaggcggagcagcagacggtctaccgcgagcgttcgccccgctatgtggcccacgaaaccgaccgttcgttccgctggatcgacggaggacgccgcttcctcattatgcaggagacggcgacgggctggatgcacctctacctcggcgagcctggcgaaccgctgcgggcgctcaccgaagggcgctgggaggtgaccggcatcgtcggagccgacgaccgcgcggtctactacacctcgaccgagcggtcgccgctcgaacgcaacctctacgccgtcgactacaaggggcggcacaaacgcctgctcacgcccgacaaggggttccatacgatcgctccgagcgccggaatgcgctactacatctcgaccttctcgtcggccgacgatccggggcgggtggagatctgcgacgcccggggacgcaccgtgcgcaccgtggccgacaacgccgccctgcgccgtctggccgacagcatccgtctgccgcgcaaggagttcttcaccttcacgaccgaacgcggcgatacactgggcggctacatcgtccgccccgcagggatcgatcccgcacgccgctacccctgcctgctgacgcagtattcggggcccggctcacagacggtgcagaaccgctggaaactcgactgggaagacgtgctggcacagcggggctacgtggtagtggctaccgacggccgcggcacgggctaccgcggcgaggcgttcaagaagagcacctacggccagctggggcgtctcgaagtcgaagaccagctgtcgacggcacgctacatggccgcg

SEQ ID NO: 12 - DNA, 201 bp, Unknown
  BMI gene
  misc_feature: SEQ ID N?22100
ttgtctcagcaatcaaaaccgacgagttttctcgttttgcttgtggtgctggccgtggcgctgcttctggtgagcagcctccttacgccaaacaccactcagtcgcttcaatattcggacgtgttggacctgttccgcaatgaaaaggtcacctcgttcacgctggaaggaagcagccttaccatgcaggtgcgaggagac

SEQ ID NO: 13 - DNA, 1170 bp, Bacteroides ovatus
  misc_feature: SEQ ID N?39244
ggggtgacggtcatgctgaaaggtacgggtatcggagccgtaaccggtgtggagggggaatatcggttggattttcccgaagtggagaatgtggcgttggtgttttctttcgtcggcatgaaaacgcaggaggtaaaatataccggacaaccggaattgaatatcgtcatgcaggaagacgttgcccaaatggatgaagtggtggtgaccggtattttcaaaaaagcccgggagagttataccggggcggtaagcacgattggaaaggaggagattttggcctatcgggggcagaatatgttgcagaccttgcgaaatatcgatccggcgttcaatgtcgtgcagaataatgaatttggcagcgatcccaaccggttgccggatattacggtgcgaggcagttcgtcgttgacaaccaatttgaaagaattgaacgaggggacgaaaagcgatttgaatgtacctttgattattatggatgatttcgaaatatcgttaaccaaattgatggattataacgaggaggaaatcgagtcgattaatatattgaaagatgcggcggctacggctatttatggttctcgcggggcaaacggtgtggtggtgattgtttctaaaaagccgcaggcgggaaaattgagggtgtttgcgcaagccgggatgacattggaaatccctgatctgacgtcgtatgatttaatgaatgcacgggataagttgagtttggaatgggccgcaggtctgtatcatcatgaaaccaatcccgagagggatatcgttttgaaagaggcttattacaagcggttgaaagcggtggaggagggcgtggaaacggattggttgagtcaaccgttacacgttggagtcgggcagaactataacctgcggtttgaagggggaagcgaggaatttcgttggtctgcttccctgggatataaagatatccagggggccatgatcggttcgggccggaagacgtttagtgggggcgtgactttatcttatagttataaaaatttgacattcaggaatcagacgagtataggaagtaataaaagcgaggaaagtccttacggctctttcagcgattatgcccgccagcaaccctataatgccccttggacggatgacggaaaattgaaccgttattttgacggttgggatgcctgg

SEQ ID NO: 14 - DNA, 273 bp, Unknown
  BMI gene
  misc_feature: SEQ ID N?49082
atgaccattatgctgatgtctggaggagaactacaactcggccagtatgcgggttttactatgatactgggcattgcaatggtcgccgcaccgggaatacccggaggagccattatggcggcattgggattgttgcaatccatgttaggtttcgatgaaacggcacaagggtggatgatcaccttgtatatcgctatggatagtttcggtagggcaacgaatgtcaccgtcgccggtgacatcgccatcatcgtaaaccgggtgaacaaatga

SEQ ID NO: 15 - DNA, 579 bp, Faecalibacterium prausnitzii
  misc_feature: SEQ ID N?50933
aaggtcatcggcgccgacctgcgccccggcccgctggccaaagcaaaacagacgctggaacatgcaggctgcgaagaccgcgctgagcttcggctcggcgacggtctttctgtgttgtcggcgggggaagtgggcaccatcgtgctggcgggcgtctccgcacagacgacgtgggagatcatcgaacaggcaccgtgggtgatgcagcccggcgggccgcggctggtcctggtgcctgccacccgccacagcgaacttcggcgctggctgtgggcacacggctttgcccttgcagccgaccgccccgtgcaggcggcgggccgctggtatgcggtgatggccgcagagtacaccggcgagcgaaaggaagcctccttcaccgaatgcctgttcggcagaaccggcgagtggccggagggcgcgggctatgcggcctggcagaaagccaagctcccccggctccggctgggtgtgccggacgggaccgcactggccgaagaaatcgatacgttgttagaatcctcaccctctcaggccgcttcgcgtccagctctcccgaagggaaagcccttggcataa

SEQ ID NO: 16 - DNA, 543 bp, Unknown
  BMI gene
  misc_feature: SEQ ID N?52448
gagctcaaggccgccggctgcaacgcgctggtggtgttcctgggcaacttcggtcccgagacgccggagaccctcatcgccaaatacttcgacggccccgtcatgtacgtggcggctgccgagggtgacggcgacatgatcaacggccgcggcgacgcctactgcggtatgctgaactgttcttataacctgggtatgcgccacctgaagggctacatccccgaataccccatcggcactgctgatgagatcgctgacaagatgatcgagttcgttcccattgcccgcaccctgctgggtgtgcgtgatctgaagatcatcaccttcggcccccgcccgcaggacttctttgcctgcaacgcacccatcaagggcctgtacgagctgggcgttgaagtggaagagaacagcgagctggacctgctggtttcctacaaagagcatgcaaatgacccgcgcatcgaggatgtctgcaaggatatggctgccgagatgggcgaaggccactactatcccgacctgctggcccgcatggctcagttt

SEQ ID NO: 17 - DNA, 561 bp, Faecalibacterium prausnitzii
  misc_feature: SEQ ID N?52602
atggacgaagatatgaatcctttatacatcctcggctggcctctcggctatgtaatggagtggatctacaagctgatcccgaactatggctgggacatcatcctgttcaccctgctgatcacgctcgtcaagatcccgctgcagatcaaccagcagaagagcatggcccggatgtccgcctaccagcctctggtcgccgacatccagaagaagtaccgcgacaagcccgacaagcagcaggaagagctgatgaagctgcaggagcagggctacaagcccaccgcaggctgtatgcccatgctggtcaacttcctggtcatgttcggcgtcatcgaggtcgtgtaccgcccgctgcagcgcatcttccacatcggtgccgatgctctgaccgctgccggtgaggccctgacgacccttggcatcagcttcaccaccgtgacccgcgacaccaacatcatcgcgcaggtcattgcgggcgagagcaccgtcaccagctgcttcaccccggaccaggtcagcaccatcaccgagttcggccagcacatggatttcttcggcatc

SEQ ID NO: 18 - DNA, 996 bp, Cupriavidus pinatubonensis
  misc_feature: SEQ ID N?62609
atgaaaacaaaactcacagaactctttggcatcaagtacccgatcgtacagagcggtatgcagtggctcgctgtaccgcagcttgcctccgctgtctgcaatgccggcggcatcggtaccatcaacgtgaccagttggcccacgcttgaggagttcggcgacgcgcttgaggagatgaacgctctcaccggcggcaagccgtttatcgtcaacatatctctggctccgactcagcgtctggacgcggaggaaataagaaagaccataaggctctgcggcgaaaagcacgtcgcggctattgaaacctcggcagacgatcccagagagtttatcgccgacatcaagggcgcgggcatgatccatatgcacaagtgcccgaactataaggtatccatgagcatggagcgcaaggggctcgacgctgtaataatcgccgggtatgaggtcggcggtcatccctccgccgacggcgtggggaccttcgtcatcacacgccgctgcgcggctgacatgagcatccccgtcatcgcagccggcggcgtttccgacggtcacggtcttgccgcggcgctcgctctcggcgcatccggcgtagctatgggcacacgctttgtcaacaccacggagtgcccgatacaccacaatcatcagcagtggatcatcgaccatacggagaaggacaccgtccttgcgcagaaaacgatcggttccatgatgcgtataaccaagaacaacgccgcccttctcgccaacgagatcgaggctcgcggccttgccaacggatacgataccgcacgcatactcaaagagcagatgcccgtcatcagcggccagaaaaccaaggcggccttcataaacggcgatgtcggcagcgccaccttctgcaccggtatgggcatgggcctcatacacgacgtcgttcccgtgcaggagctgctcgacaggatagtgaaagaggccgaggagaccatcgcttccgtcggcagcatgttctga

SEQ ID NO: 19 - DNA, 1161 bp, Anaerostipes caccae
  misc_feature: SEQ ID N?62613
atgatatttacagaagaacaaagagagatacaggcactggtgcacgcatttgccgaaaaggagatccgccccctgtcaaggaaatacgacgagctgggcgagttcccgatggagctttataagaaggcatgcaggatgcagctcaactgcctcgacctgccggaaaaatacggcggcacaggcgtatcgaaggtgacctcctgcctcatccgcgaagaactctcctggggcgatgccggcttctccctgagcctcggcgcaaacgggctcggcttcaagccgctgctcattgccggaagcgaggcgcagcgcaggcactttgccgatgtgttgctcaatgacggcttcaccgcttttgccataaccgagcccgatgcgggttccgatgcgggttctatgaaaaccaccgcgcggagggtcggagacgaatatatcctcaacgggcataagtgcttcataaccaacggcggccttgccgatgtgtacaccgtgcttgccagcaccgacaaaagcaagggcgcaaaggggctgaccatgttcatagtcgaccgcgatacgccgggtctcagcgtcggcaagcatgaaaacaaaatgggcatacgcctttcaaacaccgcggatgtaatattccacgatgtaaaagtacccgccgcgaatataatcggcggcgaaggcaagggctttcgcatcgcgatggagaccctgaatcagggccgcgcgggcacctgctcctccgcggtcggcctcatgcgcgccgcctttgaatacgcgatgaagtacgcgcaggagagagtcaccttcggccagcccatatataaaaatcaggctatacagttcatgctggcagatatggccacaaagatcgaggtcgcgcgcagcttcgggctgcaggtcgccgagctgctcgacagcggcgatacgcgtcaggccggcaagctgtcctctatggcgaagctctactccaccgatgctttgcagagtgttgtgtccgacgccgtgcagatacacgggggctacggatatatgcgcgatttccctgtggaaaagctcatgcgcgatgcaaaggtatatcaaatatttgaagggacaaaccagatacagcgtatcgtaatattcaactcccttctcaaagaaaaccgaatcagaaacgggagaggttga

SEQ ID NO: 20 - DNA, 804 bp, Eubacterium hallii
  misc_feature: SEQ ID N?62614
atgcgtattgcgatttgcgtaaagcaggttcctgcgacagccgatgtgcagatagaccgcgttacgaaaagactgaaaagagagaataacgccgtcgagatgaacgcatgcgactgctatgcgatggagctggcgctgagactgcgcgaaaaatacggcgcttccgtcacagccttcactatgggcccgccgcaggcaagagcggtgctgaaaaactgccgcgcccttggcgcggagagcggatatatcctcaacgatatggcctttgcgggctccgatacatatgctacggctcatatcctctcctgcgcgatcaaggcagacgagaccgaaaacggtccgtttgaccttatcctgtgcggccgccagtcttccgacggcgacaccgcacaggtaggcgctgagcttgccgagcagctcggcatagcacaactgacggcagtctgcgatctgccggaaatcaagggagcgtatatcgaggcgctgatcgactgcgacagcgagcagcggctcatgcaggcgagcctcccggcgctgctcacagtcggcagaactccgtatgaactgcgctttgcatcgatcggcggagtcatagaagccaaccgcaacgacaccataaagacgttgaccaaggatatgcttcccgaaatagacgccgcgatgatcggccttgacggctctccgacaagaacggcggacaccttcgtccccgagcggagatcaggagcaaagttcattgaaggcggcaccacggaagaggcagccgaaacacttgccgcgatgctgcggcgcggcacggtttga

SEQ ID NO: 21 - DNA, 543 bp, Clostridium cellulolyticum
  misc_feature: SEQ ID N?72965
ttatttatagatgagattcatagatttaacaaacttcaacaagatgctttacttccatttgtagaaaatggaacaataatattaataggagcaacaactgaaaatccatatttttcggttaataaagcgttaatatcaaggtcaatggtggtaaaattaaagccattaacttatgaggatatatttaaaattttaaaaaatgctttaataaataaagatggtttaggaaattataaaattagcattgaagatgaaacactagaggcaatagcaaaattatcatcaggagatgtaagaacagcactaaatacattagaacttgcagttcttacaacagaaatgaataaagatggaacaatagaaataactaaagaaattgcagcagaatgtatgggcaagaaaaaagcaatgtttgataaggcaggagatagccattatgataatataagtgcatttataaaatccatgaggggaagcgattcagatgcaacaatattttatttagctagagcaatagatggcggagaggatccagtattttta

SEQ ID NO: 22 - DNA, 351 bp, Clostridium cellulolyticum
  misc_feature: SEQ ID N?73911
cagagctcgtttgcggcggtcgggagcgtcagcgcctttgtgatctttttcatggtgctgctgcggctcctgtcgctcgtgcccgcgctcgctgcgctgccgccgctgccgcgcgcggcgctgttcggctttgtggagatgacgaacggcgtgaacgccctgcccgccacacgcgcgggctttgtgctctgcgccgctatcatgaactggggcggcttgagtgtacaggcgcagacccgcgcgctgctcgcggggagcgccctgtccgcgcggcggtgtgtgatcggaaaggcggtgcaggcactcgccggcgtcccgctcgcgctgctcgcggcagggcggcttttctga

SEQ ID NO: 23 - DNA, 543 bp, Unknown
  BMI gene
  misc_feature: SEQ ID N?79540
atgctgcgacggctgcaacaggcgatagccacaggcgaatacctgatgctttacatggatccggatgataccggaaaattctgctatggcagagtgctggcggcagatgaggactttgcggccctgtacctgatcgcgccggacggcgcctacgacggcctgctggtgaaggagaccggcagcgtacagagaatcgaatccggcggccagtacgacgcgaaaatgcgaaagctgatgcagggcatccagctgccggaccggcgctgggaagcgggctgcggcagcatcgcggcgcagctgctgtccatggcggcgcggcatgggtgggtggcatccgtcgagttccgggacagcggcacaaatgacgccgtcggactggtgactgcggtaaacggggagaccgccgagctgacgctgatagacgagtacggctatggtgacggagcgtgtctgttccggatggacagtgtgacgcaggtggcctgcgacggcggcgaggaacgcgccatccggcggctgtggcaggccaatagcggccaataa

SEQ ID NO: 24 - DNA, 210 bp, Unknown
  BMI gene
  misc_feature: SEQ ID N?88849
atgggaaaatataatagagaagaagcggtacaatacacaaaaacatgggcatacagccgaaatcccaagtattataactttgattcagtaggaggagactgcacatcatttgtatcacaatgtatatatgcaggagcaaaggtaatgaattacatccaatatggcttgtattacaaaaacggaaataacaaatcagcatcatggtcttga

SEQ ID NO: 25 - DNA, 714 bp, Desulfovibrio piger
  misc_feature: SEQ ID N?90256
tacgacttccccggtgatgacgtgcccgtcatccgcggctccgccctgaaggccctggaatgcgaaagcgccgacgcccctgaagccaagtgcatcatcgacctgctgcaggcctgcgacgacttcatccccgatcccgaacgcgacatcgacaagcccttcctgatgcccatcgaagacgtgttctccatctccggccgcggtaccgtggtgaccggtcgtgtggaacgcggcgtcatcaaggtcggcgatgtggtggaaatcgtgggtatcaagcccaccgcccagaccacctgcaccggcgtggaaatgttccgcaagctgctggaccagggcgaagctggtgacaacatcggtgtgctgctgcgcggcaccaagcgtgacgaagtggaacgcggccaggtgctcgctgctcccaagtccatcacgccccacaagaagttcaaggctgaagtgtacgtcctgtccaaggaagaaggtggccgtcacaccccgttcttctccggctatcgtcctcagttctacttccgtaccaccgacatcaccggtgtgatcaacctgcccgaaggtgtggaaatggtcatgcctggcgataacagccagttcctggtggaactgatcgcccccatcgccatggaagccggtctgcgcttcgccatccgtgaaggtggccgtaccgtgggctccggcgtggtgaccgaaatcatcgagtag

SEQ ID NO: 26 - DNA, 333 bp, Alistipes putredinis
  misc_feature: SEQ ID N?91577
atgaaactttccaaacccaagtacatattcgtaacgggcggcgttgcgtcgtcgctcggcaagggtattatttcggcctcgatagcccgacttctgcaggcgcgcggctattcggtgaccattcagaaactcgacccctacatcaacgtcgatcccggaacgctcaacccctatgagcacggcgaatgttacgtcgccgaggacggcgccgagacggacctcgacctggggcactacgagcgcttcacgaaccagcccacgtcgaaggccaacaacgtcacgacgggccggatttacaagagcgtcatcgagaaggagcgcaagggcgagtac

SEQ ID NO: 27 - DNA, 1368 bp, Bacteroides capillosus
  misc_feature: SEQ ID N?115552
agcgtcctggagtacttcatctccaccagaggcgcacgtaaaggtatggccgataccgcgctccgtaccgcggactccagttatctgacccgccgtatggtcgacgtctgccaggatgttatcatccgcggggaggactgcgggaccaccgagggcgtctgggcggccgctcagtacgaccgcggccagctggtcgagtccttcggcaccgcgatccacggccgcttcccggcagtcgatatcgtcgacccgcagaccggcgagctgctgttcgcaagagaccatatgctcatgcccgaggacgccggcgttctcgaggcgcacggcatccacaaggcctatatccgctccgttctcacctgcgaggcgctcaccggcgtctgcgcgaagtgctacggcatcaacctcgctctcggcaagcccgtcaacgcgggcgaagcggtcggcgtcatcgcggcgcagtccatcggcgagcccggtactcagctgacgatgcgtaccttccacaccggcggcgtcgcgggcgacgatatcacccagggtcttccccgtgtcgaagagctgttcgaggcgcgcaagcccaagaagatggccatcctctccgagatatccggtaccgtcaccatcgacgaggcgaagaagggcgtcatgtactccctcaccgtcacaaacgaggccgagggcgcgaccgtggtttacaccgtgccgcactccgcaggtatcctcgtccacaacggcgaccatgtcgataagggtcaggagctgacctccggcgcgctcaacccgcacgatgtgctgcatatccgcggcgtcaacgacgacgagttcggccgcatgggcgtccgcagctatatcaccagcgaggtccagaaggtttaccgtcagcagggcgttgacatcaacgacaagcacattgaggtcataatccgccagatgatgcgcaaggtcagagtcgaggacgcgggcagcaccaatctgctctccggcgcgaccgtcgatatctccgccatcaaggccgcgaacaagctcgttgacgagcgcatcgccgccggcgaagagggtctgacccatgcgacctacacccagctgctcatgggtatcaccaaggcctcccttgctaccgagagcttcctgtccgctgcgtctttccaggagaccaccaaggtcctcaccgacgccgccatcaagggcaaggtcgaccaccttgtcggcctgaaggagaacgtcatcatcggtaagctcatccccgcaggctccggtctggcccagtaccgcgacttcgagatggagaccgacgataacatcgcctccgagccggaggagtatgttgacctgtccgctctcgttaacaagtccaacgcgctctaa

SEQ ID NO: 28 - DNA, 195 bp, Unknown
  BMI gene
  misc_feature: SEQ ID N?115887
atggaaacataccaaatcaaaccgatatgtaaggtctcgaaagagacagtatatatacaattaattagagagtttgatcctggctcaggattaacgctggcggcgcacataagacatgcaagtcgaacggaagtcgttataactcagaacgaagatttatctgagggacgagatataacaatggctttagtggcg

SEQ ID NO: 29 - DNA, 153 bp, Unknown
  BMI gene
  misc_feature: SEQ ID N?116445
ggcatcaacgcgcaggcggacagcacggtcgaccgtctggtcgagatgatcccgggcgcgatcaacagggtatcgagcttcgtcgagggcttttcgggcaagaaaaaggcgccggctgacgaaagcgcacccatggagggcggagaggaataa

SEQ ID NO: 30 - DNA, 558 bp, Clostridium asparagiforme
  misc_feature: SEQ ID N?119925
atgactgacgccgcaattatagagctgtatttcagccggtcggagcaggccatagcagagagtgagacgtcgtacggcggctactgctaccacgtggcaaacggcattctcaacgaccgcgccgactccgaggagagcgtgaacgacacatggcttgccgcgtggaacgccatcccgccgacgcgcccgcagagtctcaaggcatatttcggcgcgctgacccgccgcatctccgttgaccgcctgcgcaagcgtctcgcggacaaacgcggaaagggcaaagctctcatcgcgctcgacgagctggccgagtgcattccatccggctggagcatggagacctcggtcgaaaattgcgcgctgattgacgcgttcaacgcatttctggcgggctgccccgcggcggagcggaacctctttgtcgcgcgctactggtacgggctgccggtcgaagagcttgcggcgcgattcggcttgaagaagagcaccgcggtctcaaggctgcggcgcacgcgtatccggcttcttaaatatctcgaaaaggaggacttgcagtga

SEQ ID NO: 31 - DNA, 453 bp, Unknown
  BMI gene
  misc_feature: SEQ ID N?119929
ttggagcgcatgaccattcacacagcgaacgacggcagtctgatacacttgcagtacgtctcgccgatggagattataagcgtcgaggaaccggccgcgccgctgaagacgtgggacgagactagcaaagccgccgcacatgccatgcgcggatggggctacgacacgctgattcccaattatgcttccgaaaaagtgtggtgggacgaggttggcgcggtggtgtccgatgtgagtgtggatatagactccgtccgcgtgggctacgcctgcgtgccgtgcggggcttcggattatctgctcatcccggcggcctcgtttgtagggacactggatgttaccggcagcatccccggtgtgcatgaaagcccgatgaacctgctgcttgacgacgatggcagaagagacgcttacctgactatcgacctgagaaccgccagcgcgttgaaataa

SEQ ID NO: 32 - DNA, 579 bp, Caldicellulosiruptor saccharolyticus
  misc_feature: SEQ ID N?122057
atgattcatccttctatttcttttgaaaaaataaaagaaaatcataaaggttccgttagaatttcaattatattaattatactgttttatatttcttctgtcattaaaactttatttggaggatttgtttttacaggttatgatcctgcagagtataattctctattagccttaatacaaagtgctggtttaataattttatggattgtttcgaattggttagtaagtactttaatgagtggcaaaggaagatttatagaaattttaattgtaacatcatatagtttagttccattgattatttcaaatgtagtatggacaattatttctaattttctgcttccttcagaatcagctttcttgagtatactgagttttgttgcgatattttattcggctatactgttgataatgggaatgcttaaaatacatgaatacacaatgacgaaatttattggaacaacggtacttactcttctcggaatgattgcaatattattcttattagttttgatagttattttatctcagcagttatatggatttatagtaacaatatttattgagatttttatgtaa

SEQ ID NO: 33 - DNA, 2580 bp, Unknown
  BMI gene
  misc_feature: SEQ ID N?122061
tgggaatatggcgatggctcgctttcttgggaagttgatattaaagaaaacggattatacaatttcggtatttcatatttgccattaaaatctgatacgtctattagattgggaatagcaattgataatattgttccttttgatggagcagaagcattagaatttagtaatgagtgggttaatgcaacacaagagcctcgtaaagataaacagggaaatgaaatagctccagaacaagttataagcgaaaaagatgtcaatctattggcgaaagacaaaacaggtgttgtaacagacccatatatgttttatttttcaacggggaaacacaatattacgcttaaaggcgaaggctatggaataataataaaaaatatatcattaagtgcaccagaaacaattcagaattatagttcggtatctaaaaattataattttaatatgagtgaggcaaaaacctccattgttattcaaggcgaatctgcaactataaaaaatgataatattttgataccaatgtctactaatggggatgctggtatgtgtccaatagatgcctctttaactaaaattaattatataggcggtactaattggaataaacctggtcaaataattgaatggtcattcaaagtagaagaagctggatattataaatttggcactcggtataagcaaaatgaattggtgaatggcgaaagttggagatggctaaaaattgatggccaaacaccatttgaagaagcaagagaattgcgctttaaatttggcacgggatggaattattatgaattcgataataatactgatgcatactatttttggttagatgagggaaaacataacatttctttggaagtgacattaggggatttatctcattttgccgaaagattaaatgatgttatttcaaaattaggagatttgtatctacaaatagttatgataactggcgaagttccagatacaaacagagattatgaattatttaatcagatacctaatttcaataccattttaactgaaattgacaccgaattaggtttattaatagaagatgcaaaagcttcatcagattctaacggcaaccaatacacagctgcgattgataatatgaggcgagtggtcacaaaaatgattgaatcgccttaccttgctcatatttatgttaaagattattacactaattatactacattaagttcttggttgaacgaaatgaaaaaaatgcctttagcgattgatgagatacgttttgttccatatgacgaagaatttgattggaatagacctgattttttagagaaactttggttttcaataaagaggttaatcttaacttttgtagacgattatgctaataatgcggatgatgaaaatcaaaaaggtataaaattatgggtgaattggggtcgcgatcaaacttcagccttggattctcttattagggattctttcacatcaaacacaggaattaatgttgatgttcagattgttaacaactctcttattaatggattgctttctggtgattttccggatgtacaactttatttatcgagaacagatccagtaaatttcggtatgagaggcgcactcacggatttaactcagtttgaagattgtgatgaagtattaaagcgtttccaaaaaggggcagaaataccatacagacataatggagctttatatgcattgcccgatcaacaaacattcttctgtatgttttataggacggatgtatttaaagaattagggttgaaagttccgactaactgggatgaatttttagattgtgcgactgaaattcaaagatataatatgggtgtttatgttccgtatacgcagatcacaacaacgactacagttaatgccggaataggaaatctaaatttatttccgacattggttttacaaaaaaattcaagtctatataacgagagtttaaatgctactgacttggatagttcaactaacatcaatgtatttgaaaattggactaaaatgtattcggattatggatatttaaaagaagcagatttttacaatagattcagaaatggttctatgcctttaggaattgcttcgtatactacatatatgacattatatagtgcggcgccagaaattcaaggcagatgggctattgagtgtgttcccggaacaataaatggaaatgattttgtggctggcggtggaaccggttgcggaattgttaaagaaagcaaaaatcaaaaagaagcatgggaatttttaaaatggtggacgagtactgaaactcaagttcgctattccaataatgttgaatctttacttggtatgttaggacgtataccaacttcaaatgtcgaagcatttaagcaactttcctggaatccaaaagatttaaataaattgatagagcaatgggaaaaggttaaagaattaccggaggttcccggaggatattatgttactcgttctgttgaccaagcgttttggtctgttttaaacgataataataatgccaaggattcaataacaaagtggtctaaggttgctgataatgaaattgcagaaaaaatcaaggagtatagttaa

SEQ ID NO: 34 - DNA, 1878 bp, Unknown
  BMI gene
  misc_feature: SEQ ID N?122064
gcgaaaaatactgaaaacaataagtggatagttaattctgaatttaatggccatttagatggagatggacacattgtttatggcgtatggtttcctgatgataatgcagccgaaagtgccggtttaatctcggtatttaatagtggctcaattaaaaatataggtgttagatattctcaaattagtgcaagagtcaacgccggagcgattgttggcactacattaaaaggcggtctaaaggaaattgataagtgcttttctgatggaactgtcacagttagttatacaacaactcaatatggtggtgcatccggtattataggtcaagcaggatatgaacaggccaatgatttgacattgaagatttcaaattgttattctaaagccaaattatccggacacagtgacgaaagagtgaacggcataatcggtacagcctggatgtcttattatacaatggagaactgctatgcaataacatattcaccttatacagctcaaaatgagcaaacttgttcgaatatgcataaaaaaggtgtggagttaaaagaaatatataagaatatctataccgatttaagaacacataacgaatgggaaaagtttactctcgttaatatcgagaatatgactggtgaaattgctaagaaatatatgtccggtttggattatgagaatgtctttgaaactgttgtaaatagtactccaaagcttaaaatattcaggacatatacaggggaagatgttgatatttccggtgattcggaggtttatgagtctggaagtggaaaaaaatccgatccgtttattattgctaatgctgaacaattgagatatttattacaaagtgataatactaaaggaaagtattacgaaatatctcatgatatttatttgaatgatgtttctcgttcaaattggactttatctaatcctaaagtttggtattcaaatagcaattcacaaatgtttgaaggatatattgatggtaaaggccattacatatatggtttatacatgaacgaagaaccagccccatataaagatggtatagcatgggaaacttcaacaacagcattattccctatggtatctactacagctgttattagaaatattcatataagaaaatcgtatatttccggaaaaggtaaagttgcatcaattattggagaaattttaaacacagataatggtttatatacgcaggttacggcttgctctgctgatgatacggttgtattaaaaggtcaagttgttggtggtatagcattaggatgggctccaagaggacttaaattacattattcttattttaccggaaaaatttcttctactgacaaggagcgaggaaatgctcttgttgctgatatatggggatttgattgggaattagtacaatgttattttgttggatatccggcatatagagcttcgataaccccttctgtaattagtagtaactatggttcttataatatgggcaacatcaaacttttaactgttgaggaaatgacaggtctcaatgcaaaaaagaacatggttgattttgaatggggtactgtctggaaaacagttgaaaatgatactccgcatttaaatgtggttcctgcagataaaactgttaaagtgtatgacgaaggtataaaaggaagagtatggtctggttatcgcgcaaaagaatacgcatcgggtagcggtactgaaaaagacccatatattatagaaactcctgagcaaatgttaaaattagttgcttatgatacagataccaaaggaaagcattataagttagttgcagatttaaaactaaatgatacttctagttctaattgggaagaatctgcacgtgagtggttagcaggtgaaaatactttc

SEQ ID NO: 35 - DNA, 111 bp, Unknown
  BMI gene
  misc_feature: SEQ ID N?133411
ggtagtaaaggtttcgacggggaatttgaagatggagaagcaggtcgcaggaatgcgttaaatccacaattaaaattaaacgctgaagataatttagcatacgctgcctaa

SEQ ID NO: 36 - DNA, 222 bp, Unknown
  BMI gene
  misc_feature: SEQ ID N?133755
attgtttttagtgaggacagaatagatttattaggtgatttcaatttaaagttttttatagaaaaaaatcacaatatttccgaatacagtgaaacttctatagtctttgattataacggtaataaatattctttaattgttgaaaatggtatgatttcgtataatacaaattattttggtgtgaccggtaaagattttacaataaaaatggttcttcaatag

SEQ ID NO: 37 - DNA, 279 bp, Unknown
  BMI gene
  misc_feature: SEQ ID N?136583
atggaggtttttatgagatatagttttgatacaactggtacttgtaccagaagaattgaatttgatataaatggtaatgtaattaccaatgtaacattttatggaggttgcccaggtaatttagctgcaatttcaagagttgttgatggaaaaaccgttgaggaaattgaaggactttttaaagacataaaatgtggttcaaagcctacatcttgcagtgcacagcttgctattgcagtaagacaagcatataatgaattgcaaaaaaggttaggttaa

SEQ ID NO: 38 - DNA, 657 bp, Unknown
  BMI gene
  misc_feature: SEQ ID N?137542
atgagtagaaaaagaatcctccttcgtctaaaacaggagtgggtttgccgaccacaacaaaaaaagacgaaggaagaaattaaacctaaagtaataacaaaacctaccgaagcatcgacgtcggaaaatactaagccaaaagaagaaacatcgtcgaaggctgaagaatctcaaaaagaaatatatgtgggaaatcaacggctggaggttgatcctgcggagctcgaaaggcttgttatagaaaaagtaaacgcctaccgcacagcacaaggcgatacggcagcaacaatgctccccagactaaccgaggtagcaagatacagagcaaatgagctaaccaccaacttctcccacacaagtagccgtgatgtgtgtaaggaattaaaatacggcgaattcgtagatatgacactctacggtatgaacgccgaggatagttactaccaaggctacaatcgagaagccatcggcatgggagattggtttggtacggcagaaagtatctccgaccgcatagctgacggctttcaccacagcaaaggacactggtcgtatgtcggtagttccgagtatccgtatattgccgtaggcgtaacccaagcaaacggaaaatggtatgtctgcgtatgtatgagcgagaaaaattacggcggataa

SEQ ID NO: 39 - DNA, 1194 bp, Unknown
  BMI gene
  misc_feature: SEQ ID N?138082
atgccgtcgatcagagaaaagcagactaaggacgggcgcacgttctatgaaattcaggtgtcgcgaggtcgctctcgttctcggttgacttctcgctggtatccaccggaagggtggagtaagaaagcaattgaccgggaattggcaaaggttgctgctgaatttgagcgccgttgcgacaatggggaggctataagccgggcagagcaaaaagaaattgacctcctgcaaaaacaggaggccgcaaaaattcaaactctgtgccaatatggggagcgcgtatttatgccagcaaaagctgtgacaattagcgaaaacagcagaaacagctttcaaggaaaccttgagcagtggatataccccgctatagggaatttacgaatacctgatattacagcggcaaatatatctgcactactgcttgatatgcaagcgagagggaaagctcacgcgaccgtaatcaaggtttacacggtgctaaattctcttttcaaaatggcatacttatccgatgttgtcccaaaaaatccgatggacaaggtcgaaaggccgaaacagcgaaaggatgaagctcgaacgatcgaagcagcggcatacacggttgaggaagtgcagcatattctttcctgccttgagaaagaaccgctaaagtggcaggcgttggtgcggctactggttgatacaggcattcgcaggggcgaatgctgcggcctacaatggaaagatgtcgactttggcgggaatacgattactgtcgcgggaaatctctgctacacgccgcaaaaaggcatatatcttgatacaccgaaaaacggcaaaacgcgaacaatagatgttgacccggcggtaatcgcgctcttgcagcagctccggctacaacaggcagaacacgccatcagtgctttcgtgtttacacaagacgatagtccgaagccaatgcacccacagtctcccacaaggtacttgaaaaagtttgccgaacgatacgaaattgacgatctgcacccgcacaagctgcgccacagcttcgccagtatcgctatcacaaacggcgcagatattgccagcgtttcggaaaagttggggcactctgataaagcggttactctgagaatgtatacccacgccgatgcagaaagcatgaggcgggcaagtaagattttcagagaagcattaaaaaagacggctcaatag

SEQ ID NO: 40 - DNA, 306 bp, Anaerococcus hydrogenalis
  misc_feature: SEQ ID N?146660
atgaagaaaaaagttttatccatcctgttagctgcaacatttaccgtatctatgtttgcaggttgcggaaacagcaacactacagcaaaagacgacaacgcagctaaaacagaagacactgctgatgacgcagcagaggaagaaaccaaagatgacgccgcaacagaggacacagcaagcgacggtgacttcaacattactgtaaacctggcttctgaacctatgactatggacccggcgctgaacagttctgtagacggtggcattatggccctgcatctgtttgaaggtctgatgaaatgggaa

SEQ ID NO: 41 - DNA, 1305 bp, Bacteroides pectinophilus
  misc_feature: SEQ ID N?162617
atgatttcagaaagtgttgaaaatgtaccgcaaagggaatataatataaacgtatgtttttattatttggaggtaaatatgagttttgcaacaactactgaaatggctgaaaaatggagcatttctagaagaagaattactcgtttgtgtggtgaaggaagaatagaaggtgctgttttaaagggaaatacatggttaatccctgatagtacagaaaaaccagatgatcctcgccgcattagaaggaatatgcaaaatacattttacaatatagtgtactcagttaaagaaaaaaagttttcgacaatagagttatttgcaggtgctggtgggttagcattaggtgtggaagaagctggctttaatacaatcggattgattgaacttgatagagatgcttgcgatacattaaagaagaatcgtcccaattggagagttatttgtgacgatatagctaatatctctaaattggatttagaagattactttggaatcaagaaaggtgaattagatttactgtccggtggagcaccatgtcaggcattttcatatgcaggtaaaagattgggacttgaagatgcaagaggaacattgttttatcactatgcgatttttttggaaaaattacagccaaagatgtttttgtttgaaaatgttagaggactgttgacgcatgaccatggaaagacctatcagaccatgcttgaaatttttgagaatgcaggatatgacattcaaaagcaggttttgaatgcttgggactatggagttgcacaaaagagagaacgtcttatcacgataggtattcgtaaggatttaaaagaaaaaataacattcgaattcccagaggcacatgactataaaccagtgctaagagatatcttagaaaatgttccagagagtgtaggtgtgccatatggagagaataagcgtaagctttttgaacttgtacctgccggtggatattggagagatatagacccagaattggcgaaagcatacatgaagagttgctgggacatggaaggtggaagaactggaattttaaggcggttatctatggacgagccttcattaacggtacttacttcaccatcacagaagcaaactgaaaggtgtcatcccttggaggcaaggcctttcactgtaagagagaacgcaaggtgtcaatctttcccagatagttgggagttctgtgggaaggttatgtcacaatataagcaggtaggaaatgcagttccggttaatcttggatatgaagtagcaaatatgatatatgaagcattggaaggagcagaggactaa

SEQ ID NO: 42 - DNA, 528 bp, Unknown
  BMI gene
  misc_feature: SEQ ID N?173708
acagcaaaggttccggtggaagatgtttatatcgtcctttcgcatgaaaattgggtggatatgaatattaccgcggaatgtcgttcttttgatggtatccgaggatatcagacctttacggacagtatcacgaataactcctacggcatgcccggagagactcaaataaaatttagcagcttatcccttccgaacgcgcagaagtacggtgaaattacgattgcagcagagcttacctttaaaacgaaagaaacccagcatcaatgtttcccggcaacgattacccaaaatatggggaaatatcatctgactgtctgcaaaacctgcggcgtgcgtatgttctacaaccttaccgcagcgagcagccggcacgataatcttgagtggaatacggataggcatgaaaagttttgcgaaagctgccaggaggcaattgaaagggactatgaagagccgacggtaaccggtattgaagcagacagggctttttatataccccacacgcaggatggctctttaggtttcaaa

SEQ ID NO: 43 - DNA, 942 bp, Clostridium difficile
  misc_feature: SEQ ID N?174206
atgataaaaccaaaaggaggaactagaattatgaaaatatccgctatccgttctgacaaagtttattcaaaaattatgaatgcaccgttagacaaaaaaaatgacatttatagatatgaacttatgaagccttttgaaaaaaagtgggcttgttatagtgttcctatgaaagctctaacgcctaatggatatgatgtaattatggcaagcgaaatgcttggacatatcgccccaaccgctgttgaccaaaagcaacaaaataatattaagctaatttctgataatacactctgggaaaaatgtgagttatccattcagcagtcgttgaattgctttgttgaacacggtgttaatctacccattaaagaatatgcgtttacaattttacttgcaaatgctaaaaatccttacattattttaaatgatggttactgtggtgatggtggtattccaggatatattttttcttggttactacctaatgaatacactttatcacatcttcatgtagcattagcacatgaaactaatcacaacgtacgatttcaatttattaaatggaagaatgacatcactcttggtgaaatgatagtcaatgagggattggcagaaaactttgcaacatttctgtatggtgaagataaagcaggtccttgggtaacaaaaactgatatagaaaccttaaatgaatatattaagcctattattcgggacggtttaaatgttcaaggattagaaaatctgaatgcatacctttatggtgatgaaatggcagcattacaaaactatcctcaggtcggattaccctattgttccggatatgcgtgtggctatcacttgattaaacactacttgcaaaagactggaaaaaacattgtcgaagcaactctattacctgcaaaagaaattttaaatgctacggaggatttttggaatgaatga

SEQ ID NO: 44 - DNA, 288 bp, Unknown
  BMI gene
  misc_feature: SEQ ID N?175969
atgaaatacgaagccatgaagcatcagggaagcagagcaggtggacttacgctggacgaactgggaggagctgcaggagagagtgcaaaaactgttcaaagatatatatggatttcacgattatcggaaccgttgcttgatatggtggattcggggaaaataggcattatgcaggcggtggacatctcgtttttatcagaggatgcacagcaatgggtattggttgccatacaggacaccaatgctgtcataagccaaacagcagagtgccatgctgaaggaaagtga

SEQ ID NO: 45 - DNA, 528 bp, Bacteroides capillosus
  misc_feature: SEQ ID N?224681
gagagcctgtcctcctacgcccggatgtttctgggccagatggacaagcccgacgtggactatatcgacggcctgtctcccgccatttccatcgaccagaaaaccaccagcaagaacccccgctccactgtgggcacggtgacggagatctatgactacctgcggcttctatgggcgcggatcggcgtgccccactgtcccaagtgcggcaaggaaattcgccagcagaccatcgatcagatcatcgaccagatcatggcgctgccggagggcacccgtattcaggtaatgtctccggtggtccgtggccgcaagggtgagcacaccaaggtgctggaggacgcccggcgctccggctatgtccgcgcccgcattgacggcgaaatgcacgagctggatgaagagatcaagctggtcaagaacaacaagcatcagatcgacattgtggtggatcgcctgatcgtccgccccgacatcgccacccgcctcaccgacagcgtggagaccgcctccaacctgtccggcggc

SEQ ID NO: 46 - DNA, 1113 bp, Bacteroides capillosus
  misc_feature: SEQ ID N?225907
atgctgaaattctcctgcgaaaaagcgctgctgcaagcggcggcggccaccgccagccgcgccgttgccgcgaaaagctccatcccggcgctggagggcctgctgctggagggcggcgacggccttaccctgtcgggctacaacacacagaccggtatccgcacacggctggaggccgatgtgcgggaggagggccgcatcgtactgaatgcccgcctgtttggcgacattattcgccgtatgccggatgatatgattgtattctcggcggacgaaaagctgatggtgcacctcagctgcggcgacgccagctttgatattctgggcctgtccgccgacgattaccccgagctgccggaggtggacgaccagtacggcgtcgccatacagcagaaaacgctgaaggccatgatcggccagacggccttcgccgtctccaccaacgagagccgccccgtccataccggctccctgtttgagatcgacgacagcggccttaccatggtgtcggtggatggcttccgccttgccctgcggcacgagccgctggagaagatcgagggcggcgcgttccgcttcgtggcgccgggcagcgctctgaaagaggtagagaacatctgcggcgacagcgatgatatggtcaatattacctgcggcaagcgccacctgctgttctccgtgggcgagacccagctgatctgccgccgtctcgagggcgaattcctggattacaagaacgccattccccgtaataaccccattctggtggacgtggagaacagcgccctgctgcaaagccttgaccgtgtgtcggtggtcatcagcgagaagctgaaaagccccgtccgctgcgtgttcgaccttgaccgggtgtatctcagcgcccgcaccggcaacggcgaggccaaggatatctgccccacaaagggcgacggcgcgggccttgagatcggcttcaataaccgctatcttatggaagccctgcggtacgccccggcggacacggtgcgcttttccctgaacaccaatatttccccctgcgtcatcacccctaccgacggcagcgacagctttttgtatatggttctgccggtgagattgaaggcgcagtaa

SEQ ID NO: 47 - DNA, 621 bp, Desulfitobacterium hafniense
  misc_feature: SEQ ID N?225953
ttgaatgtttatgatatcatcaatttaacagatgattatagtatttatgaaaaggggaaaaatatgatttcagtaaacgatttaaaaacaggcttgacgcttcaattggacaacggtttatggtctgttgttgaatttttacacgtaaaacccggcaaaggtgctgcgtttgtaagatcaaaacttaaaaacgttgaaacaggtcaggttgtagaaaaaactttccgtgcaggcgaaaaagtcgcaaaagctatgcttgacaggcgcgaaatgcaatacctgtataaagaaggtaaagaatatgttatgatggataacgaaacttatgaacagcttcagttaaccgaagaacaaatcggggacggaatcaaatatttgaaagaaaatatgattgttcaggtattgatgcacgattcaagaattataggcgttgaccttcctgctcatgtaattcttgaagttacagatactcctccgtcagaaaaaggaaatacagctcagggcggtacaaaacctgctactcttgaaacaggtgctgttgttaatgttccgttctttatttcaaacggcgacaaaatcagagtcgacacaaggactaacgagtatcttgatagagcataa

SEQ ID NO: 48 - DNA, 762 bp, Bacteroides capillosus
  misc_feature: SEQ ID N?234271
atgataaccctgaaatccgagcacgagatcgaactgatgcgccgggccggaaaaattaccgcggctgcccgtgctctggcacgggaaatggtaaaacccggcgtaacaacccaacaaattgacaaggcagtgtatcactttatcaagtctcagggggcggttccctccttcctgaactacaacggctatcccgccagcgtttgcgtcagcgtcaacgacgagatcatccacggcatccccggtaagcgggtgctgaaggagggcgatatcgtcagcgtggacgtgggcgcctacatcggcggtttccatggcgactgcgccggcacctacccctgcgggcaggtgtccgaccaggccctggatctgatccgcgtgacacagcagtgcttcttcgagggcatcaagttcgcgcgggagggctatcgcctcagcgatatctcccatgccgttcaggaatacgcggagagccacggctacagcatcgtgcgggagtatgtcggtcacggcatcggccggaggatgcatgaaagccccgaagtacccaacttcggcaaccccggccacgggccgcgtttgctgcggggcctgaccatcgcggtggaacccatggtcaacgccggcagcgctgcgatccgccagatgcctgacggctggaccgtcaagacggcggacggcaaaaacgccgcccattatgagaacaccattctgatcaccgacggcgatccggagcttctgacggacgcctccgattccctggtgtaa

SEQ ID NO: 49 - DNA, 957 bp, Bacteroides capillosus
  misc_feature: SEQ ID N?235177
atgcgggagctgaccatcggaaaaaacgacgcgggacagcggcttgaccgctttgtgtccaatcctcggccgctgctgccgccggcactgctgcagaaatacatccgcctgaagcgcatcaagtgcaacggcgcacgggcccagcgtgaccagcggctccaggagggggacgtgctgcaattatacatcaacgacgagttcttcgacaagccccgtgaggacaatctgttcctgacgcttttcaagcccagtctcaccatcgtgtacgaggacgagaacctgatgctgctggacaagcggccggggctggtggtacacgccgacgagacggagaaggtcaacactctcatcaaccacattcaggcgtacctctaccagaagcgggagtggaaccccaagtgggagaacgcctttacccccgccctgtgcaaccgcatcgaccgcaacaccggcggcatcgttatcgccgccaagaacgccgagacgctgcggatcatcaacgagaagatccgcgaccgggagatggacaagcggtatctctgcgtcacggtgggtgcgccgcagccgccgaaagggcgggtggaggtctttctggtgaaggacgagaagaagaaagaggtatccgtccacaccaggcctgtccccggcggcaagaccgccgtcaccacctacgagacgctggagcgccgtggcgagctggcgctggtggaggtagggctggagaccggccgcacccaccagatccgcgctaccttcgcccacatgggctgtcccctgctgggggacggcaagtatggccggggcgacgtgaaccgccgctacggcgagacccggcaggcgctgtactcctacaagctgacgtttgacttccccaccgacgcagggatcttgaactacctccgcagccggacgtttcaggtggagcgagtgcccttccgggataagtacttcgggtaa

SEQ ID NO: 50 - DNA, 123 bp, Unknown
  BMI gene
  misc_feature: SEQ ID N?242887
atggggacatggggaagtggggtggttggcggcgaagaagttggcggggaggcagcgaatttcaaccacttcccccatttacgttgccttttaggcttcttgccggctttaaaggcaacggat

SEQ ID NO: 51 - DNA, 987 bp, Heliobacterium modesticaldum
  misc_feature: SEQ ID N?246223
gtgtgggtggagctatctgagctgattgaatcagtcgatatccttgaatacatctcgcaatatacggagttcacagaaaagaacggagaatattgggcgttatcaccattcaaagatgagaaaactccctccttctccgttcgcaaggagacaaactcattttacgacttttcatcgggcatcggcggtaacgtactgacattcattcggtattacgacaagtgtggttatgccgaagctatcgaaaaactgaagaattacagcggagttgatggcaatgtgattgccagaaaaaaattagcgacagttgaggtcgctaagaggtttatgccgccgaaaaaagtgcagaagcagtcaaaatcaactgtgcttccagacgattatatggagcggtacgaaaaaagaccggacaagttagccgtttgggagcgcgagggcatatccaaagactcactcgataagtttgatgtgtactatgacagcttttcggatagattggtttatccaatacggaatccagatggaaaaatcgtaaatgtaggcggtagaacgcttgacccggcatggaaagaaaagggcttgcgcaaatacacttactttatggcatggggcgagctgaaaactatctatgggcttgcagaaaacatggaggacatcaagaaaaaaggtgaaatcatcctttttgagggatgtaagtcagttttactcgcagatacatatggggtacacaacacaggtgcgattttgacatcgcatcttaatccgaatcagatgaaactgctggtttcccttgggtgcagggtagtttttgcccttgacaaggacgtttgcatcagggatgaccacaatatcaagcggttgaagcagtttgtaaacgttgaatacatttgggacaaggaagatttgcttggcgataaggacagtcctgtcgatagaggtcaagatacttggaaaaaactctacgacgggaggctgtcatggcgatga

SEQ ID NO: 52 - DNA, 1314 bp, Unknown
  BMI gene
  misc_feature: SEQ ID N?246224
atggcaagggttgagagtgaggctggtattatcgctacgctgattcatcaccctgagttctcgtattattcagagcaactgttgccgaaccatttcaccaacgaggagaaccgctatatctatcaagcgatttgttctcttgcacgagatggaattacgacgattgacccgtataacattatccaagcgctgtctgctaaggaagcaacaaggcgttttgcggatgagctcagtatcgaccagctctatacattgatggacaacagtgatagcattgcccgaaatactgttgaggagtacaaactgcttgtcaacaatgttatggatgcagcttttaggcgagatactttccagcaactcaaagagtgtcagaagctttgtacgcagccgtccgaagcgaacatcgagcagaaaatctacaagatgctggatgatgtgatgatggagttctcggcgacaaatgaagttccaccgtacaaggatgtcgtggataaatgctgggaagaaattaagggcagacagggcgctggatacgcaggtattccctttaagttccctgcattgaacgattatgcgaccattgagcgtggagaactgtttatctttggtgcagagcaaaagcaaggcaagagtatgatgcttttgaattgcgcagttgacttgctgaagcaggattacgcagtcctctatctggatagtgagctaaacactcgactgtttacatcaagaatcttggcgcacctatctggcatcgagtacaagcgattgacatccggcaattacagcgacgaagaggaaaagcgtattctggacgcaaaggagtggttaaaaacgcgcaagttcacccatatctatattccaatgtttgaccagcagagcatttttacggctgtgaataaggttaagcatacgcaggggcttgatgttcttattgttgattactttaagggcaaaggcgagggcgatgcgtttgacagctaccaagagcttggcagatttgtagatatggtgaagaaccagatttgcggcgagatgaatattgctggtattggtgccgctcaagcaacgattaccggtaagcttgccgatagtgcaaagattgctcgtaatgcctcaaccattgcaatgatttccgataaaaccccagaggaaatcgaagccgatggtgccgagtgcggtaacaagaaactccgcgtaactgtaaaccgtaatggtatgcagatgacgcaggacgaatacatagatttgctgttcgacgggaatcacatcctctatgaacaggcaaaacagcacattccacagacacctttttaa

SEQ ID NO: 53 - DNA, 1197 bp, Anaerofustis stercorihominis
  misc_feature: SEQ ID N?250611
atgaagtctgtatctcagatgcttgccccagtggaaaagctggcgggcgagcgagaaaccggcaccgggaacaacacctcggtaaacaagtactggaacgctatgggtgtggcgtactgcgggtacaccatctggtacgccgaccggcagagcggaaagccgtatctgctggacggctgccaaaacccggcgtggtgccgatctctcggagagtggttgacggccaagggatggcggctcaaggacaacagcaaggcgcagaagggtgacattgccttttattgcgaatacaaccagaaagaaagccgctggatgtaccagcatgtgtttttcatttacgagaagcttgacggtacgacctttatcacgctggaaggaaacaacatggtgttttccaccgcagaaaaagccaagttgtctacggcgggaactggtgcctttgagggaatcggctataaaaagcgcgttatgcccaccagcggaacgtgggcgatctttcacccatcctatggaaaggaagaagctatggaaaagagagtttatctgtctccctccaatcagaagagcaacacttacgccgtgggcaacaccacggaggatgtgcagtgcggcaaaattgcggcagcgtgcaagacggcgctggagcgcagcggtgtgaaggtcatggtcggtcaatatgacaccatggcaaaccgatgcaaagcatccgacaacttcatggccgacctgcatgtaccgatccacaccaacgccgccaacggaaaggccagcggcacgcggattttttgctatcagctggacaagtctagcgaggggtacaaggcggcaaaggctgtgtttgatgtgctggctccggttactccgggcaccagtgagaacatcaaggccaacccgtcgctattcgaggtgaaaacacctgccgctcccaccgtttacattgaggtggatttccacgatgtgccagatgtggcgcaatggatcatcaataataccgaactaatcggtgagaccattgcaaaaggaatctgcaattaccttggtgtgaccttcaaatcggccaacaaacccacctcggccggaaatgtaatttaccgcgtgcagatcggcgcattcagcgtaaaagccaatgcggttgcatttctcaaggaagtgcagaaggtgtacccgaacgcgtttattacaaaggcgacgaaataa

SEQ ID NO: 54 - DNA, 411 bp, Unknown
  BMI gene
  misc_feature: SEQ ID N?265214
ggcagggacagcacgaccgcttcgatgaaaagcattcctccggcgcttcccgcgcttattcgcgctcaaaagatcggaaaatatgccgcaaaggcgggatttgattttccggatgccgaaagcgctttcgggaaaatccccgaggagaccgcagaggtcgccgagcttatcggcggagatgacagggatcggctcgaagaagagctcggcgatcttctcttcgcggtggtgaatgtctgccggaagacaggaatcgacgcagaatatgcgctcgaccgggcgaatgagaagtttcttcgccgcttttcgcacgttgaggacgacgtgtgcgcctccggaaagaagatatccgatcttgaaatggaaacacttgattcgatttgggaccggaataaggcgtcggaaaggtga

SEQ ID NO: 55 - DNA, 900 bp, Clostridium bartlettii
  misc_feature: SEQ ID N?278309
atgcggaggaccgagatgaaagacggaaaccaaaagaatatcagcccccgtttgaggattgcaattgccgtgtcggcggctgcggcgcttattctgatcacggagattatttcgcttttcgccgggagagaaggcacttccgcgccggattcgcaaatcggcacgggcggcgtttcgcagatcgattcgtccgccgattctgcggattatgcggacatcacacggggcagcaccgacggttcgaaaacgcccgcaccctccggggattcgtccgatacctccgacagcacgaaaactccggacagcggtgagaacggcggaaacggggacgacgcgcccgcgctttccgtcgatctcggggacgggatcgtccttaccgggatcacttcggttgacggcgcgtttgtcgaggacggaagcgacgataagcttgagggaatccttgccgtgaccgtgaagaacactgccgaaagaacgctccaatacggaacgctcgtccttcccggcgcggacggcgcgcagttcaccgtgaccactcttgcaccgggtagaacggcgctgctgcttgaagcctcgcgcgcaaaatacaccgacgggatagacacggacggcgcgcgtatgacgcggagtgcgtttttcacaacggagccgacgcttaattccgatcggatcgagctgagctgcaccgacggggagatacacataaaaaacgtgtcgggcgaacgcctcgacgcaacggtcgttctgtattacaaaaacgtccgcggcgacatgttttacggcggaataacgtacagggtatcggctgatgtcggtatagatgcgggtaaaagcgtgtcggtttcggcaccgcactgcacctccggtgcaaccgaagcggtttttgcggggatcggctga

SEQ ID NO: 56 - DNA, 435 bp, Unknown
  BMI gene
  misc_feature: SEQ ID N?283745
atgaaagtaagattcaaaaaaattctccccggtgcgaaggtgcccgtgtattcctccgaatttgcggcgggtgccgatctgtgcgcctgcgttgaggagagcgttaccgtgaagagcggggaaagcgttatgctcccgacggggatcgccgtcgagcttcccgcggggacggtcggacttgtgttcgcgcgcagcggacttgcgtcaaagcgttcgcttgctccggcaaataaggtcggcgtgatcgactgcgactaccgcggggagatcaaggtcgcgctgttcaaccacgggaagtgcgatcagaccgttgagcccggcgagcggatcgcacagctcgtcgtcgtcccgtatattaccgcggaattcgaggaggcgcaggagctttcggataccgtgcgcggagagggcggcttcggctcgaccggaagataa

SEQ ID NO: 57 - DNA, 558 bp, Unknown
  BMI gene
  misc_feature: SEQ ID N?285668
gcggacggcagcgcgagctttgatatcgagccggacaggaaagcatttgtatacctgcgtgtgacggatgcgagcggcaacattaccgttatcaattccgatggtgtggtggtctacaccgatgccgaggcaatcaccgaagcagtcagctttacgaagcttgacggcgcggatgtttccttccgggtcagccttaacggcaataccgtaagagcgctgtataacggtgacgcacttcttgacagcgctgattatacggtatccgcagacggaaccgtaactcttaaaaacagctatctttccgctcttgcagcaggcgaatacaccgtccgtgcgacctataacccgttgggtgaggaatacaggtcgggtgacgagcctgccgtgacatcggtgaaattgaccgtgagcaaaaaaacgccgagcataggccatgtgccgggcgatgcaaagaactacgacggaaatccgataagcgcgccgacctttgataccgattccgacggtactccgacggttgaatataagcctgcagatgcggatgattcggcatatacc

SEQ ID NO: 58 - DNA, 1506 bp, Coprococcus comes
  misc_feature: SEQ ID N?298274
atgggtgtgcggctgctgctgtattggtctgccatggcgctgctgctggtggcgacgatcctgtctatcctgatggccacgggtgtgctgtcccatcctgcccggcagctggccggcgctctcgacattcagcagagaaatacatacgcggcactggatgcgcagatgggtgatctgacagcgcgcggtgtggctctgtcggaaaagctgggacgggagctggatgccttcctggcggccaagggcattccctttgacgcgctcaacgacgatccgggcaccatcgcggagctggaaaagcgcctgtatgcgccgctgagcagtacgctgagcgccacctcgtgcagtgggagcttcttctgtctgaacgtcaccgccaacacgtcgctgcccgatgcggacgctctcagagcggggctgtatctgcgctatagcgggctccagcccacggtggcctcggagcaggatgtgatctgcttccgcggcgcggcggaagcgtcgcgggggctgcagcttcaaatgcacaaccgctggaatccggagctgaacaccgcgctgatccccggcagcgagcgggtcctcagcagtcaggccactcgtccggcagagggcagcctgtggacaaagcgctcggagctgtcggacacatgggagcatgtgatgctgctgtgtgtgccgatcctggacagcagcggcgccgtgcggggcttctgcggtgtggagatcagcgatctctatttctccctttcccacgacaccgtgtccagctcctatggcaatatgctgaccctgctggcgcccatcgacggtgacaggctcgacctgtcgggggccatgctgggtgccacctccggctcgcgcctgacggccgacggcacgctgcacatcgagccggggaaatactataccacctataccgatggcaaggagtcctatctgggacgccaccggctgctggatgccgtcacctcggacggcatcccccttgccgcggtaacgcttgtgtcggccaacgccttccgcagctatgagcgtggcgtgcagtccgcatggctcctgggctcgctgctgttcctgctggcgatgctggctgtgtcggccgtgctgtcccgccgcttcgtcaagccgatcaacgagagcctcgcggcggtcagaggcggcacaacagaggtggtggcctccggtattccggagatcgacgagctgctggccatgatccgggcgcggcccgtgggtgcgctgccgcccgatgtagaggcgcggctgtgcggctttgcagagagggcgggcacgctgaccggcatggagcgcaccatcctgcaatactacatgggcggctataccgtcaaggatatccccgagctggcgcgcatcagcgccagcaccgtaaagacccataaccgcaatctgtaccggaagctgggtgtggattccttcgatgagctgaaggtgtatatcgagctgtttgccgcctgcggccgcagcggtgagctgctgaaacgataa

SEQ ID NO: 59 - DNA, 1062 bp, Dorea formicigenerans
  misc_feature: SEQ ID N?307613
atgatcgaaaaaatgaaggtcgtccacattgtggcggccgcctcggaaaaaacagcgctgctggataagctgcgggagctgggcgttgtccacttcgcggaaaaggccagcgccgatcaagggtatctggagcgctttgcccggctgtcccgcatggagatgacgctgcaggaatatcccaaggcccagcaggagacgacggtgctgtccgatagtgaatttgaagcgttttatcagcagctgtccgactgcatggagcgcaaaaaggcgctgctggagcagcaggccgccgctcatgcggcggcggaaaagctggccgaatggggccggttcgttccggcggagctgcgggagctgaaggagcagggctgggagatccacatctaccgcaccgacaaaaagaccatggccgccctggaggccgatcccgacgttcgcttcgtgcggctggctccggtaggcaagatgcctacgctggcggcctttgcacccctgcccggccgatactccgccacggagtttcccgttcccgacaaggggctggacgagctggagcaggagcagcagagctgcgacaaggcgctggcggactgcgaagccttcctgacgcaagcggcggcgcacctgcccagcatccgcgaccaactgctcaagacccagaacgccgccgagtattccgccgtcagcaacacgtcccaaagtcaggacgggctggtgtggctcagcggctatctcccggcggcggaggtggacggcttcaagaaggccgctgccgaggcgcactgggcatgggccatggaggagcctgccgccgacgatgacaaggtgcccacaaaggtgaggcacaacaagggcacgcggctgatgattccggtgttcgacattctgggcactgtccccggctatcgggagtacgatatttccttctggtttctgggctttttcaccctgtttttcgccatgatcatcggcgacgccgggtacgggtgcctgttcctgctggcggcgctggccatgacggtgaagaataaaaaagcctccaccgccgtgcagcttttgtgg

SEQ ID NO: 60 - DNA, 315 bp, Unknown
  BMI gene
  misc_feature: SEQ ID N?308567
gcagttatatgcaacaatgacggcatggcggagggggcgatctccgctctcaacggagccggatacaacacgggaagcggaaagatgatacccgttttcggagttgacgcgaccgatgcggcacgtcaatatatcgccgacgagaaaatgaccggaacgataaagcaggatgccgacggaatggcggcggcgctttcccatctcgcgtcaaacgggatcgagggtaaaagcataatgagcaacaccgaaaattatcatgttgacagtggagtagccaaaataagaatctcgtattcaaaatatctcggagaatag

SEQ ID NO: 61 - DNA, 462 bp, Clostridium bolteae
  misc_feature: SEQ ID N?308629
atggggtttgatatgggatttggaatggggttcggcatgttcaatatcatgttttttctgatattcggcgttgtgatcgtgatgtttatcgtcacggcggtgaagggcatcagcacatggaacaagaacaacaactcgccccgcctgacggtggaggccacggtgtcgtccaagcggcagaatgttgatgtgcaccaccacaataccggggacaacaacgccatgcataccaccacctccaccacctattatgtgacctttcaggtggccagcggcgaccggatggagctgcgcgtcgatggccgggagtacggccagctggcagagggcgatttcggcgagctgacgtttcagggcacccgctatctgggctttgagcgccggggcagcaaggcggcctactacgaccggcctgaaaatggtgaggagcgccagcgagcctcgtgggatccggaacgataa

SEQ ID NO: 62 - DNA, 348 bp, Bacteroides capillosus
  misc_feature: SEQ ID N?311862
atgatcaacgaaaatgcgactcgtcataccctctctgtcctggtagacaacgcctccggcgttctgagccaggtatcccgactgttctcccgaaagggctacaacattgagtccctggcggtgggcgcaaccgataaccccgaagtatcccgtatcaccattgaggtgctggcggacgatatgcaaatcacccagatcatgaaccaactgggcaaaatgttcgtggttcattccatcaagctgctggcaccggagcacagcatccgcagagagctggtgctcatcaaggtacgggcagaaacccgtgaagtgcgcaacgaagtcattcagatcgcaaacatcttccgg

SEQ ID NO: 63 - DNA, 210 bp, Unknown
  BMI gene
  misc_feature: SEQ ID N?313271
atgacaaagcgttttctttccgttcttcttgccgtattgacggtagttacgataattcccgtatcggtctttgccgacggtgatattaccgtgtctacggcagacgagctgcgtcggctctcggaggctgtcgcaggcggcgagagctatgagggcagaacggtagtactcgctgctgatatcgacctcggcggcaagagtgcgccgtgg

SEQ ID NO: 64 - DNA, 180 bp, Clostridium difficile
  misc_feature: SEQ ID N?319760
tcgtccgtggctctcgggtgcgactttgacggaatagactcgccccccgaagggctcggcgacatttcacatctcccgaggctttacgacgcgctcgctcacgccgggctttcggaggacgatgcagatcgggtattttggaagaatgctttcgattttgctcgggacgaattacggtaa

SEQ ID NO: 65 - DNA, 534 bp, Anaerotruncus colihominis
  misc_feature: SEQ ID N?322345
gtgagcgaacatagtgaaaagacgtacagcataatatcattggattcgggaaatgcgggggtaacggtaaagcttgccgcgtcggacagccccgaggtgcagacataccttattaaaagacgcacgatgaaaagtctcggattgcatgagggcgatacggttgatcaggatgcggtgtcgtgcatatttgacgatgcggagctttgccgcgcggaggcaagaacgacaaagatcctttcgtattcggatcacagctgtcaggctcttgtgcgcaagcttgtgtcatacggcttttccgaggaaatcgcgcgtcaggcggcacagtccgctgtcgatcggggctatataaaggagaccgagcaggcggcgcagtgcgcggactactacatacgtcataaatattggggcaagaagcgcattgcgatggagcttatcagccgcggatacggcagaaagaccgtcagcgaggcgatagcgacgataagcgacgcgcttttcgaggcgacgatagtgaagctcgtcgagaagaagtag

SEQ ID NO: 66 - DNA, 624 bp, Unknown
  BMI gene
  misc_feature: SEQ ID N?327975
atggatgcggacccgcgcaagaatatcatcctgacccagaccgaggggctgatgatgtcgaaccgtccgaaaaatccaaaggacgcccgcaacaaaaatgtgctggtggtcggcggctccggttctggtaaggcgcgctttttcatcaagcccaatctcatgcagatgcacagctcctacgtcgtgaccgacccgaagggtacggtactgctggaaaccggcaagctgctggaacgaaacggccaccgcatcaaggtgttcaacaccatcaacttcaaaaagtccatgcactacaatccgttcgcgtatattcacagcaaaaaagacattttgaagctgacgacaacgctcatcacgaacacgaagggcgaaggaaaaggcggcgacgatttctggctcaaggcagaaacgctactttactgcgcccttatcggctatatctactacgaagcgccgcccgaggaacagaacttcgccacgctcattgagatggtaaacgcgatggaggttcgggaagacgacgaagaatttgagaacccggtcgatattctgttcaaggagcttggcgaaaaggaccccaatcatttcgctgtgcggcagtataaaaaattcaagctggcggcg

SEQ ID NO: 67 - DNA, 513 bp, Unknown
  BMI gene
  misc_feature: SEQ ID N?330101
atgcccatgccagcagcgctgctcgtttccaagtcgccgccgctctgcggcgagctgacggtccacggtgcgaaaaacagcgtcctgcccatcctggccgcgacgctgctatgcaggacgccctgcgtcctgcataactgccccgatatcctcgacgtgacccacacgctgcagatcctgcgccatctcggctgcagctgcgagcgcagcggatcgaccctttccatagatccgcgcggctttgcggaaaacgccgtcccaccggcgctcgcaggctccatgcgcgcctcgagcctctttctcggcgcgctcctggcccggaccggggcggccgcgctgacgcttccgggcggctgccccatcggtgcgcgccccatcgactatcacctgcaggccttccgcgctctcggcgcgtccgccgaagaagaaggcgggactgtccgctgccggacggaccggctgcacggcgcgcgcctccccctgcccggccccagcgtcggcgcgacggaaaac

SEQ ID NO: 68 - DNA, 492 bp, Clostridium perfringens
  misc_feature: SEQ ID N?330692
cagatcgccgagaggatcgaggcgatgaggacggagctttccgatatgacgctgcgctgcgacgcggtcagacttgcgatagacactctcgagagtgcgggcgaaaagcttcgcgccgacgttatgccgagaatcataaagggcgcgtccgagcgcttctcgacggcgactctcggacggtattcgtcgctcggcgtggcgcacgatttctcgatgagctataccggagacgcgggtacgcgcgaggcggaatacctttctgcgggaagcgcggacagcgcgtatataagtctgcggctttcgcttgccgaggtgcttttcggaaagcggaccccgccggcggtgttcgacgaaagtttcgcgcgtatcgatcgcgcacggctcgccgaaatacttgccatgcagagcctgccgcaccgtcagtcgcttttgttcacctgccgcgagcttgaggcggagcttgcgcccgaggcgaacataataaaactgtag

SEQ ID NO: 69 - DNA, 102 bp, Unknown
  BMI gene
  misc_feature: SEQ ID N?336242
ttgtccaatgattacctcacccgcgcccaaaccttgattgaggcgcttccctatatccaaaaatacaacggcaagattgtcgtcatcaagtacggcggcaac

SEQ ID NO: 70 - DNA, 567 bp, Unknown
  BMI gene
  misc_feature: SEQ ID N?338413
atgcgcctgacgggcaagcgacagatcggcgagctgcagctatccgagctgatcaccgcactgctcctctcggagcttgccgccgcgcctacggcaaatccgtccattcccctgctgcatgcaatcctcccgataacagcgcttatcagtctcgagatcatcggaacgatgcttgtaacaaaatccgttttcatccgccgaattcttgacggcgtgccgagcatcattatcaaccgcgggaagctggatattaaagcactgtcaaacgtccgcatgagcgtagaagagctgatggcagagctgcgtctcaaaggatatgcacacccggaggacgtcttttacgcaatactcgagcagaacggaaagctatctgtcatcccgagagtttccgccgtacctcctgccgcggctgacgcggcactgacactgcccgagaaaggaatatcgcatctacttattgtcgacggaaatatcagcgacaagagtctgcaatttacaagcaagagccgcgcatggctttttaagcgcctcaagtcgcttggctacagctctgaaaaagagatattc

SEQ ID NO: 71 - DNA, 966 bp, Unknown
  BMI gene
  misc_feature: SEQ ID N?339122
gggaaaaccgcgaccggtctcgacgctgcggtacgcaagtacgcaaacgcggtcgatacgggcagtgccgacacgctcgacattgcttaccacgaaggaaaccgcatcgacgagctccgtcttgcgggcacggacatttccgaatacgcaatcgaatatccggcggaaaacaacgagaatatgcgctatgccgtgtccgaaatgaagcgcctcataaagaaggcgtgcggagttgacatcgcctcctccgaaggaatcacggatcgcaaatatgcgatagaattccgattcacggatgacgagagcctccgcgacgacggctaccgctacttcttcgaaggctcgcgtcttgtgatcgaaggcgcagtcgcgcgcggctgtatgtacggcgcgtggttcttctttgaaaatgagctcgaatgggagtcgctcacctacggaaacagctatcttcccgaagcggagcttattgatgtgagctccgacacacataaaagcgccgtgccgctttttgactatctccatcccttcctgtcacagtactattattttgaaaccgatgtaacaataatgaatcccgaaaccacttcttcgttgtactcctacggcacaatcaagcatgcctgccacggtctcggagacggttggggaaactgcgatgttcggtacaaacagatctgctacaccgacgaagaagttcgtgataatgtacgcgacagcatcgtggaacatcttgagcaacgcattgcggcgggtcagcgtatcggatacgagatcaaatacatcgatcttgcgcagggtgacaacggatactactgccactgctccgaatgcatgaaagtcgtcaaggaagagggcggtgcaatgtccggaacggtaattcgctgggtaaaccgaatcgaggacgatatcagcgaaacctacgacggagttgcatacctcgttttcgcgtacatgggaactcag

SEQ ID NO: 72 - DNA, 1311 bp, Clostridium hylemonae
  misc_feature: SEQ ID N?340553
atgtcactattcacatactactacgtcagtgccgcgctggaactgttcgctgcgttcatcacggtggtcatgctgctgatccgtcctcttatccaggaacagcactctaccgtggacgccttccttgtggcattgctgtgcgcccatgccctgtcattgctgctggacgcgcctatctggatcctgctggcagagccgtctccggagcgagtgccgttgatcaaggtgctgacctttcttacggatctctttctcatctccgcccaggcgctgtacgcatggtgcctgacggcgtatatttcggagcggcagtacatatcccgccgcccggtttggtacatcaccgggttgtctgcagcagcggtgctgacatgcctgctgtccgccttcaatgaaatgtacattggctatgacgcctccggagcggactttaccggctcgctgtactggctgtatctgctgttcactgtgcaactgcccgcttccacggcactgctggcctttcagcaccgccggatactggggcggcgggatacatgggtattcgcttcctacggcttgatcgtagtggtcagcgtcccgctccagcttttctgggccatcacccccgtctacctggcagcggatgtgacagttctgctgttggcctgcacggtgatctatacagcgcaggtacgccgcaccgcccaggcagagaaaaaactggtagagcaggaactgtctctgtccgaaagccgcaatgcgctgatgctttcccagatccagccccacttcctctacaacgcgcttactgccatctactgcctctgcgacacccgtccggaaaccgccaagaccgccgtcagcgatttctcccgctatctgcggggcaatctggactccctcaaaagggagggccttatctccttctccgacgagctgcgccacacccaggcctatctttcgctggagaagctgcgctatgaggaggcgctggaggtggcctatgacatcaaggttagcgacttcctgctgccgccgctgaccattgagccgctggtggaaaacgccgtgaaccacggcataggcgttttgccttccggcggatgcgtgaccatttccacccaggagctgcccgagtactacgaggtgcgcgtagcggacaacggcgcgggctttgaccccgatgtcatccccgctgacggacatgcccatgtgggcatatccgccgtccgcagccgcctgcacatcctgtgcggaggcacgctggacatacgaagtgcccccggtcaagggactgccgccatcatccatattccgaaaggagcataa

SEQ ID NO: 73 - DNA, 456 bp, Unknown
  BMI gene
atgatcctccaagccctcgtctcctactacgagaccctggccgcccggggcgagctgccccagcccggctgggcgccggtgaaggtgtcctatgtgctcaatctggacgaccaaggggacatcaccaccgtagtctgcatcaaggaagaagtaacacgggggaagaagaaggcgctggtaccccaaaccatccagctgcctgccccagtcaagcgcaccgtaggcgtgaccgccaacttcctctgcgacaactccagctacatcctgggcgcagacaaaaagggcaaacccaaacgctccttggagtgcttccaagcctgcaagaccctccacgagactttgttggtctcggtggaggagccagctgcccgggcgctgttgtcctttttcgaccattggcagccggagaaattgacggaacacccggcctttgcccaccaggatatggaggatctt

SEQ ID NO: 74 - DNA, 663 bp, Unknown
  BMI gene
  misc_feature: SEQ ID N?342915
ttgggcacagacggtattgagtttgacgcggtgctgagcagtgacggtatggcggttatttcccatgacagaagagtccgcgatccgaaaacggggaaagtgcggaaaataaaatccatgacatataccgaaataaaaagcctcggcaaaacgatcgcgggcggtctccctgtcggttgcggttctgtagccgtagatgatccgatattctttccgactgcggaagaagtattttccgcactctcgccgacctcgctcacgctcaatgtcgagctcaaggatcattcggcacggctttgcgaaatatgcgcccgggcggcggaacgcttcgggatgaccgagcgggtgatatattcgtcgttctcgcccaccgcactttggcgcatgaaaaaagcatgccctgcggcgcgtaccgcactgcttgtcagattccttccgtttccgttcggcattttggaaggtctcggaatttcagccgtccatatccctgtccgctgtgcattgcggtatccgcgtaccgttgaaaagcttcacgcgaaaaatatgtcggtcgcagtctggaccgcaaattccgcggaggatatctcccgtgcgtccgaaatcggagcggacgcgataataaccgacgatcccgtgcttgcactgcgcctgctcgggagaaaa

SEQ ID NO: 75 - DNA, 144 bp, Unknown
  BMI gene
  misc_feature: SEQ ID N?347956
cacgaaatgggatttgcccgcgaagtcggaacaagggttttgttcatggacgaaggcgttgttcttgagcagaatactccgtatgaattcttctcatctccccaaatggacagaactaaagaatttctgtcaaaggttctctga

SEQ ID NO: 76 - DNA, 459 bp, Unknown
  BMI gene
  misc_feature: SEQ ID N?350967
tacgagctcgctttttacctcatagccgagcatcggatcgcaaatcacggattcttctacggtccgtatcttcccgtatacggtttcggtgctcttttcattcttctgtgcacaaggtctttcaaaaaatatccgatagcggtatttcttctttcaattccggtgaccggtatcctcgaatactttacggggcttgtcatgttcaggatatggcacgcgcgttggtgggattacacgaccgcatttttgaacatcggcggatttgtctgtctgagaagcgtcctttccttcggtgtcggagcgctgatactcatttacatagtcgatcccgcggtttcgggaatcacgggaaagctttcgccgcgcatgagaaacgccgtctcggcgctgcttctcgcgcttctgatatttgacatcatcatgaccgttcttttccgcatgccgaagccctttgcgtaa

SEQ ID NO: 77 - DNA, 549 bp, Coprococcus comes
  misc_feature: SEQ ID N?358755
atgccaacacttcaagaatacaaatgcccgtgctgcggcggcgagatcgtcggagacgcgaacaccgcggcatcctcgtgtccgttctgcggaaatcccgtcgttatgatgaggcagttttcgggagcgctcggacccgactttgtgacaccgttcaagccggataagaaagcggcaaaggcggggcttcagaagcatctgacgggcaagcggcttctgccgaagatattcaggaatcaaaaccacatcgacgagatcaagagcgtgcacgttccgttttggctgttcgacaccgtgaccgcagagagcagcagcgtacagcttcacggcggcaaagcgaagtatgcgctttaccccgtgtggattctgaacaccacatggaagggtcaaaaatacacctttgcgatgaacggacagacaggaaagtttgtcggtgatctgccggtagataaggcggcggcgcgaaggtggaaactgattctcactgcggctttttctgccgccgtttacgctgcggcgtggcttctctggtttctcgatattctttaa

SEQ ID NO: 78 - DNA, 276 bp, Unknown
  BMI gene
  misc_feature: SEQ ID N?359744
ttgctggccaattttgtgtgctacaatggatgggaaacatacttctgtctcccaaagattttacagaagaaggatgaggagtttattatgaccaatcaagaactgcgacagttgcagctgaccgcctgcgatgtgcgcaaatgtgtcctgactgccacccacagcgccaaatccggccaccccggcggcagtctctccgcggccgatctgttcacctacctgtacttccacgaactgcgcatcgaccccaagaaccccgcctgccccgaccgggac

SEQ ID NO: 79 - DNA, 465 bp, Unknown
  BMI gene
  misc_feature: SEQ ID N?360143
atggaagaaaatttcgagtttaaggatcaaaaaatagttgacgttcatatggagcgtgagctgaaggattcgttcattcagtacgcgatgagcgtcatcgtatcccgcgctctgccggatgtccgcgacggactcaagccggttcatcgcagaattatctatgcgatgtacgaggacaagataacgcacgataagccgttctataagtcggcgacgacggtcggtaacgtgctcggacgctatcatccgcacggcgactcgtcggtatacggcacgatggtcagaatggcgcagccgttctccctccgttatcctctcgtcgagggtcacggaaacttcggttccgttgacggagacccgccggcagcttaccgatacacggaggcgcgccttgcgcgtctgtccgacgagatgatgagagatatcgaccgcgacaccgtcgattttgtcggcaacttcgataac

SEQ ID NO: 80 - DNA, 378 bp, Unknown
  BMI gene
  misc_feature: SEQ ID N?376654
ttggaaatcatcatcagcagcaacaacagcaagccgatctacgaacagatcacgtcccagatcaaggccaagatcatgagtggggaactggccgccggccagcccatcccgtccatgcgtgccctggccaaagccatacatgtgagcgtcatcaccgtccagaaagcctatgaggacttgcagcgggatgggtttatcgagaccaccgtgggacgtgggagctttgtgtcggcgttgaacaaagactttatgcaggaggaacagcagcggaaggcagaggaacatctccaggcggcggcggacatcggacgtgccaacgggatttccctggaaaagctgttggaactgctgaccctgttttatcaagaggaggaatga

SEQ ID NO: 81 - DNA, 1176 bp, Clostridium phytofermentans
  misc_feature: SEQ ID N?379402
atgaatatgaacatcctccgctgctgggcggagatagatatggacgccgtgtgcggaaacttccgatcgatacgcgcgttcgttccgaaggaaaaaaagctgatggcggtcataaaggcggacggatacggtcacggctccgtcccgatcgccgaagcgcttgaaggcgaggcggatttttacggcgtcgccatgctcgacgaggcggtggagctgcgtcaggcgggaataaaaactccgatactgattctcggatatactcagcctgagctttttcccgtgcttgtcaggtatgatatacgtcccgccgttttccatacgtcggatgcagaggctttcgatcgctgcgcacgcgcggcggggaagatcgcgcctctccacattgcgcttgaaaccggaatggggcgcataggctatcccgataccgacaagagcgttgaagagatcaagaaaatatccgcgctcgaaaatgtttgcgtagagggaatattcagccatttcgcaaaggcggatgccgaagataaatcctatgcacagcttcagcttgaaagatacagctcctttatctccaagcttgaggctgcgggaattttcattcccgtgcgccatctctgcaacagcgcggcgacgatagaatttcctccgaaattcgatatgctgcgtgaggggatcattctctacggtctccgaccttcatatgaggtcgatatggaaaagataaggacacttcgccccgcgatgtcgctcagagcccgtgtcggtcatgtcaagacgatcgaggcgggggacagtgtcagctacggctgtacatataccgcggactgccgcagaagggtcgcaacggtgtgcgcgggatatgcggacggagttccgcgtatcatctcgaataaggcgcatgtgctcatacacggaaaaaaggctccgatcatcggcaggatctgcatggatcagcttatggccgatgtttcggatattccggaaaccgaagtcggggatgtcgcaacgctgttcgggcgtgacggcgaagaggagattttcgccgacgacgtggcgacggtcgcacagacgatcggatacgagcttgtctgcggcataacgaagcgcgttccccgcgtgtatatgcgcggcggaaaggttgagaaaatacattacggcatcccgcacgaagaagcttga

SEQ ID NO: 82 - DNA, 558 bp, Unknown
  BMI gene
  misc_feature: SEQ ID N?410894
gtgctgcgcggccggaccggtctggccgacgctgcgcgccccgccgcttcctttttgctgatcggcccgacgggcgtcgggaagacggaattatgtaaacagctcgcgcaggtcgtctacggcagcccggacgcgctcatccgggtggatatgtcggagtatatggagccgtcgagcgtctcgcgcctgctcggcgcgccgccgggctacgtcggctacgacgcgggcggcacactcacggagaaggtccgccgccgcccctactgcgtcctgctcttcgatgaactggaaaaggcccaccgcgacgtgacaggcatcctgctgcagctgctcggcgacggcatcctgaccgacagcctcggccgcacggtcagcttcaaaaacgccatcgtcgtcatgacctcgaacctgaccggcacgcagaccggcaaacccggcctcggcttcacgccggactgcgaggatgtgcgcgcgcagaccgtcctgcgcgaggcgttctcgccggaatttctcggccgcatcgactgcgtgacgaccttccggccgctcaccgcggcg

SEQ ID NO: 83 - DNA, 261 bp, Ruminococcus lactaris
  misc_feature: SEQ ID N?447063
aaaaaaaaaaaaataaaatggagtaaaagaaagaaaaccagccatactaataaaggaggtgtttatatggcaacttctagtatcacgaagaattttatcatatccggtcagaagcaggtagagatgtttgtcgatgcgatagagaattctgccaataatcgcccggtgcgcactccagtatctgcgagacagataaaaggagaagcagagttgagaaaattcatggaaaagaggaagaaagcggatgtcggtcagagataa

SEQ ID NO: 84 - DNA, 417 bp, Clostridium bolteae
  misc_feature: SEQ ID N?450567
atgtatgtcaacagcgattatatcgaatcagatctgaacaacggcggaattcctatggcaattccggcagttgccatgaaagcgaatccggaagatgtacttgccgtgtgcgatggcattctggttcccggcggagaggacttaaatccgtggtattatggggaagagccaaaaccgcagatccagaccattcgcccggagatcgacgaggcatggttcgcacttggacgggcggcaaaagagatgggaatgcccatgcttggcatctgcaagggaattcagtttttaaatgtcctgtgcggcggtgatctgtaccaggatatctatacacagaaggaaaccacaattttgcatctgcagtccctggagcggtcatacctgcacaaccagtcatcagaggcagattggagtctgtaa

SEQ ID NO: 85 - DNA, 789 bp, Faecalibacterium prausnitzii
  misc_feature: SEQ ID N?457960
atgaaaaccgcattgaccattgcgggcagtgattccagtggcggtgccggcatccaggccgacatcaagaccatggcggccaacggcgtctttgccatgagtgccatcacggccctgaccgcacagaacaccaccggtgtgaccggcatctttgagacgacgccggagtttctggccgctcagctggacgccgtgttcaccgacatctaccccgacgccgtgaagatcggcatggtctcctcggcaccgctcatccgcaccatcgccgaacggctgcgcttctatgaggcaaagcacatcgtggtggacccggtgatggtggccacctccggctcccggctgctgcgggacgacgccatgcaggccctcacggagcagctgctcccgctggcagaggtcgtcacgcccaacatcccggaggccgagatcctttccggcctgcccatcaccgacgccgccgggatggaggccgccgcccggaagatcagcgagcagtacggctgttccgtcctctgcaagggcggccaccaggtcaacgatgccgacgacctgctctggcggaacggcagcgggaagtggttccgtggggagcgcatccataaccccaacacccatggcaccggctgcaccctgtccagcgccatcgcctccaatctggccaaaggctatgacctcgacacctcggtcgagcgggccaaggaatacatttccggctgtctgtccgccatgctggacctcggccgcggttccggccccatgaaccacatgcacaagctcttcctcgattaa

SEQ ID NO: 86 - DNA, 606 bp, Faecalibacterium prausnitzii
  misc_feature: SEQ ID N?457996
atgcaggcatttcatcttctcggctctgcgccgttttacaccaacagttttctgctgctcaccaaggcaggccatgcggtcatcatcgacccggcggccggggtgcaggagtacgataagatcctgcgggaccacggcgctgtgctgacgcacatcctgtgcacccacggccactacgaccatgtgggcagcgccggtgcgctgagccgcgagtggggcgcaaagatctggtgcgaagccgccgactgcgccgggacccagctcttccccctgaagagcgccgatttcggttatggggaggggaccaacatttcggtggatgagctgaccttcaccgcatggcacacccccggccacaccgagggcagcgtggtgctgctgtgcagcgaatatctctttgtgggcgatacggtctttcagggcagcatcggccgcgccgacctcgaaggcggcagcgaccgcaagctggaggcgagcctgcgcaagttcgcgggcctgcccatccccaaagagacccagctcctgcccggccacggggatttctcgacctatggcgaggagctggagaccaactattatatcaaagccgcactgcggaacgcataa

SEQ ID NO: 87 - DNA, 963 bp, Faecalibacterium prausnitzii
  misc_feature: SEQ ID N?458062
atggctgaaaagagcatcgaactggatagtgtggagatcgcggcggcggtttttggaaactgtgaccgcaacatccgcctgttggagaaagagttttccgtcacggctgtctgccgcggcacaatgcttcgcctgtcgggtgaaagcgccaatgttgccgctgcggcacgtgccattgaggggatgcttcttctgatcgagaatcataccccgctggaagagcagaccgtgcgctattgcttgagccttgcgcatgacggcgaggaaaagcgtgtcaaagagttgacggaggatttcgtgaccgtcaccgtaaaggggcgtccgatccgccccaaaacgctggggcagaaggaatacctcaacgccatccgcaagaatgcagtgacctttggcgtcggcccggcgggtacgggtaaaacgtatctggctgtcgcaatggccgtcaaagcctttaaggcaaaagacgtttctcgtatcgtcctgactcgcccggcggtggaagcgggtgagaagcttggttttctgcccggcgacctgcagcagaaggtagacccttatctgcgcccgctctacgacggtctgttcgatatgctgggggccgaaacgtacgagcgtctggtggaaaagcagatcatcgaggtcgcgccgctcgcatacatgcgtggacgcaccctggatgactcgtttatcattctggacgaagcgcagaataccacccccgaacagatgaagatgtttctgacccgtatgggtgtaggttccaaagtggtcgtgaccggcgatgtgacacagatcgacctgcccgaccgtacacgcagcggtcttgtggacgcgctgcagatcctgaaaaatgtggacggcatcgcacaatgctactttaccgaaaaggatgttgtgcgtcatcgtctggtccaggagatcatcaaagcatacgaagccgccgcgcaccccgccaagcgctga

SEQ ID NO: 88 - DNA, 348 bp, Faecalibacterium prausnitzii
  misc_feature: SEQ ID N?458092
atgggaaagtattttgggaccgatggcttccgcggcgaggccgggatcacgctgaccgccgaccacgcctacaaggtgggccgcttcctcggctggtattacaacaagctccgcgagcgcaacggcaacaacgagcctgcccgcatcgtcatcggcaaggacacccgccgcagctcctacatgtttgagtacagtctttgtgccggtctgacggcctccggtgcagatgcctatctgctgcacgtcaccacgacgccctctgtggcctacatcgcccgcgtggatgacttcgactgcggcatcatgatctcggccagccacaacccgttctacgacaacggcatcaag

SEQ ID NO: 89 - DNA, 753 bp, Faecalibacterium prausnitzii
  misc_feature: SEQ ID N?458657
atgacagttttgcagacgatcgccgtggcatttgccatgttctcggctgtgccggtgccgcagtttgactggaacgagaaaaacatgcggtattcgctctgtgccttcccgctggtgggggtgctgtgcggcgcactgtggtgcgtgtgcgccagcctgccgctgcccgccatggtgcgcgcggcgggcttttgcctgattcccatctgggtcacgggcggcatccatctggatggttacgccgacacctgtgatgccctttgcagctatggcgatacccagaaaaagctcgatatcctcaaggacccgcactgcggcgcgttcgccgtgatccggctgtgcagctactttgtggcctactttgcgctgtgctgctgcgtgcagtttaccccgcaggtgggggctgtctggctgctggcgctggtgctggagcgtgcctgctccggttacgcagtggcggcctttcccctggccaaaaataccggccttgcgcacacatttgccacggcggcggaccgcatcacggtgcgccgggtgctgggatgccttagcattgtgctggcagtggcactttttgccctgggcggcggcgtgctggtgctggcggcaggggttgccctgtggcgctaccaccgtgtggcggtcaagcagtttggcggtattaccggggacctggccgggtggtttttgcaaaaagcggaactgtatatgctggcggcccttgtgttttgccagtggaagggatttttgtaa

SEQ ID NO: 90 - DNA, 930 bp, Faecalibacterium prausnitzii
  misc_feature: SEQ ID N?458959
atgagccagatgatcgattttacgctgccgtcgagcgcaccggggcggatgcttcatgcgttccgctgtgtgccggagggcgaagtgcgcgccatcgtgcagctctcgcacgggatggtggagttcatcgaccgctacaagccgctggccgagtacctcgctgcacggggcatcctcgtgaccggaaacgaccatctgggccatggcgggtccatccggaccagggccgactacggctattttgccgagccggacggcaaccggacagtgctggatgacctccacgccatgaccattctgacgaaacagctctaccccggtgtgccgtatttcctgctgggccacagcatgggctcattctatgcacggcagtatctgtgcgagtggggcagtgagctggacggtgccatcatcctggggaccggtttccagccgaaagcgctggtcgcgtttgcccgcacggtctgccgggtgttggcggtctttttcggctggcagcatcgcagcaggctggtggcggagctttcgttcctgggctacaacaaggggctggagggccgcaccacccacgactggctcaaccgcgaccctgccgaggtggacaaatacctcgccgatgagcggtgcaccttcacgtttacgctgaatgcctattacagcatgttcactggcatcctgcggctgtacgacccggcctttctggcccggatgccgaaagacctgccggtgctcttcctggccggtgatgccgacccggtgggcgagcgcagtgcgggcgtccggcgggccgtgcagagcatgaaggatgccgggatgcgggacgtgcaggtcaagttctaccccggtgcccggcacgagcttctggtggagacgaaccgggccgaagtctttgccgacatcggcgattttgtggaacggcaccttccctga

SEQ ID NO: 91 - DNA, 435 bp, Faecalibacterium prausnitzii
  misc_feature: SEQ ID N?458961
gcccgccagcccaacgacggccggttcacggtcgtgcggggcctcaccgagtggatgagccgccacgcccacgaggtggagaagttctgtatgttcttcgatacagcggagcaggcgcaggccgccctcccccgcttccgagcccttgccggggccgaggtcgtgcagggctcgccggacaacatcgagctcacggcgcagggggtggacaagggcacggccctgctggcgctggccgacctgctgcacatcccccgcgaagccaccgtggccgtgggcgacagcgagaacgaccgcgccatgctggaaaaggccggcattgccgctgtgatggccaacggaatgccccacatccaggctctggccgaccttgtgagcgcgaacgactgcgaccacgacggcgtggccgagctgtttgagcggctggggctgtga

SEQ ID NO: 92 - DNA, 696 bp, Faecalibacterium prausnitzii
  misc_feature: SEQ ID N?459167
atgcccggaatgggcaggaagggaaccaagatgcagaagaagaattaccaggaagagatcctgaacctcatccacagcggtctgccgcaggcagagctggcggaaaagctttccgactaccacgaaaatgacctggccgatgcgctgacggcgctgacgccggacgagcgccagaagctgtacccggtgctgggcatcgagcgggtggccgagatcttctcctacctcgacgatgcagagccgtatctgaaagagctgccctcggaaaaggcggcgaaagtcgtctccaacatggactcggacgatgcggtggacgcgctggatgacctcgaagaagaggacaaggccaagatcgtcggccagctggaccgggactccgctgaggatgtccggatgctgctctcctacggcgaggatgagatcggcagcagcatgaccaccaactacatctccatccggaaggatatgaccatccggcaggcgatgagcgagctggtgaagcaggcgggcgagaacgacaacatctccaccctgtacgtcgtggacgagaacgacaagttctatggtgccatcgacctgaaagacctcatcattgcccgcgcggacgaccagctcgaaaagctcatcgcgcggtcgtacccctatgtgaccgaccacgagaagatcagcgactgcatcgaccgcatcgtggactac

SEQ ID NO: 93 - DNA, 726 bp, Unknown
  BMI gene
  misc_feature: SEQ ID N?459170
gaggccgccatccgggccgaagacatcctcgacagcgacctcatgctctgcacctgcgagcaggccgtgcgcgtgggcctgaagggcgagtatttcatgtccggccgcatcgacgacctggagtgtgcctacaccactctgtggggctttttgcagggccgcggcgaagaggaaggccgcggcgacgtctgggtcatgttcgacaacgaagaggtcggttcttccagccgtcagggcgcacagggcaccctcatggccgatgtgctggcccgcatcgaagaaaagctgggcgtcacccgtgagcagagcatccgtgcctgcaccaacagcctgctgctgagcgccgacaacggccacgccacccatcccaaccaccccgaaaagagcgacccggcccatccggccacgctgggcggcggcgtcctgctgaaatccaacgcccgccagacctacaccaccagcggcctgaccggtgcggccttcagcgccatctgccagaaggccggtgtgccggtgcagttcgcgtccaaccgcgccgatgttcccggcggttccacgctgggcaacctgctgggccaccagatcttgatcccgatggtggacatcggtctggcccagctggcgatgcactcttccatggagaccgccagctgcatcgacgccgagtacatggccaaggccgtggccgaattctataacacccccatctctcagccgaaggatggc

SEQ ID NO: 94 - DNA, 867 bp, Faecalibacterium prausnitzii
  misc_feature: SEQ ID N?459293
atgaaccacacgcatcgccgccagctcttctggaacagccttgtcatcgtctttggcaacgcgctctacgcgctggcggtcgccttatttctggagcctgccgggctcgtgaccggcggtgccaccggcatcgcgctggctttcgggcggctgacaggcctgtccatctccggctttctgctggtgttcaacctggccatgctggtctggggctgggccgttctgggccgcgcctttgcgctgaacacgctggccagcagcatcctcagccccgtttttctggcgctgtgggagcagcttctggccgaccgcgtcctcactgaggacatcttcctgtgcacggtcttcgcggggctgggcatcggcgtggcactggggctggtcatccgggccggtgcctccaccggcggcatggatatcccgccgctggtgcttcagaaatggttccgcctgccggtgtctctctcgatgatggtcttcgacatcgccatcctgctggtgcaggcgctcttcagcccgccggaacaggtgctctatggcatcgtgatggtcatcctgcacaccatcgtcatggacaaaatgctccttctgggcgacagccgcacccaggtcaagatcgtcagcgcccggtcggacgagatccgggatgccattctggagcagatcgaccggggcgtgaccatcctgcacggcgagggcggctacacccacgagcccaccgaggtgctgctcagcgtcgtttccaaccgggagctgcccaagctcgaaaagctcgtccattccatcgacccggaatgctttctcatcgtcagccgcgtcaccgaagtcagcgggcgcggtttctcgctggaaaagcagtatcaataa

SEQ ID NO: 95 - DNA, 429 bp, Faecalibacterium prausnitzii
  misc_feature: SEQ ID N?460879
gacctgcgggtggatgcctttatcccggaaaaatatattgccgacggccccggccgcatcgaagcctacaagcgcatcgcggccatccagaccgccgaagacgccgccgacgtgctggatgaactcatcgaccgctacggcgacccgccgccttcggtcagcgacctggtcaacgtctcgctggtccgggtgcaggccaccgccgtgggcgtgtacgaagtcacccagaaaaaggacaccctcgtcctgcaggtcgagacgctggatgtcccgatgatccgcggcctgctcgtggccttcaatggccgcgtcaccgccggtgccggcagcaaaccctatctttccgtcaccctgcagcccgatgaaaagccgctggacctgctgcaaagcatcctcaaggcgatggccgagattttaggaacaaaataa

SEQ ID NO: 96 - DNA, 573 bp, Faecalibacterium prausnitzii
  misc_feature: SEQ ID N?461115
atgggaggaacgttcatgtctacggaatattttgagcgccgggagcgggcgctgctgggcgggcggtacgaggcgctgtacgcggcacccaccgagaacgcggcccgcggggtgacggtctcggcgctgcgcacgacgccggaggcgtttgccgggaaggccgacttcccgctccggccatcgccgttctgcaaggcgggcttcgtggtcgaagaggctgccttcaaacccggacgccacccataccaccatgcgggcgtgttttactcgcaggagccgtccgcgtcctctgccgcaccgctgttgggcgtccggccggggatgcgggtcctggacctgtgcgccgcgcccggcggcaagagcagccagcttgctgctgcactgggcggctggggcctgctcgtcagcaatgagtatgtgcccgcccgcgcagaggtgctgaaaagcaacctcgaacggatgggcgtggcaaatgccgttgtcctcaacgaggacaccacccgcatcgctgccgccctgccggagttcttcgaccgtgtcctcgtggatgtgccctgttccggcgaggggatg

SEQ ID NO: 97 - DNA, 864 bp, Faecalibacterium prausnitzii
  misc_feature: SEQ ID N?461216
atgagacccctgaagctgaccctctcggccttcgggccatacgccagcgccgtcacgctggaactggagcgcctgggcaaaggcggcctgtatctcgtcaccggtgacaccggcgcgggcaagaccacccttttcgatgccatcacctatgccctgtacgaccattccagcggcggtgtgcgggacggtgccatgctgcgcagcaagtacgccgaccccggcacccccacctttgtcgagctggaatttgaggtgcgcggtcagcggtacaccgtccgccgcaacccggactacctccgccccaaagcgcggggcgagggcacgaccaccgaaaaggcggacgccgtcctcacctacccggacggccgcccgcccgtgacccggtcgaaggatgtcaccgccgccgtcaccgccctcatcgggctggactacgaccagttctgccagatcgccatgatcgcgcaggggcagttcacccgcctgctcaacgccacgaccgaggagcggagcaagatcttccggaagctgttccgcacccagcgctaccagaaattgcaggacgcgctgcaagaggagaacgcccacctcacggcccagcgcacggcccagaacgtccagctggacgcggtgctctccggcatccgctatccggagaccgaccccgacgccgaagcgcttggcgagctttcggcgcagcgccccgccgaggaagtcactgccctgctggacgggctcctcacccggcaggaagcggaactctccgctgctgccgccgcccacaccgccgcgcaggcgcagctggacgctttgcagcagacgctgggccgggccgagcaggccgaagccctccgccgccagcgggtc

SEQ ID NO: 98 - DNA, 990 bp, Roseburia inulinivorans
  misc_feature: SEQ ID N?462093
atggagccgccgtgggcggcagaagagggaaagcaacctatgaacaacgtcaatttacgcaagatcgccgtcatcggctgcggcttcgtcggctcggcgtccgcctttgcgctgatgcagagcaagctgttctcggagatcgtcctgatcgacgcagaccacgccaaggccgaaggcgaagccatggacatcagccacggcatcccctttgtgggcaacatgaagatctatgccggcacctacgatgacatcgtggatgccgccatcatcgtcatcacggcaggcgcaggccagaagcccggcgagacccggctggacctcgtgcacaagaacctgaacatcttcaagagcatcatcccggagatcgccaagcgggaatgccgcggcatcctgctggtggtggcgaacccggtggacatcctgacctatgccgccatcaagctgtccggcttcccggagcaacgggtcatcggctccggcaccgtactggacaccgcccgcctgaagtatcagctgggcgagcacctgtccgtggacagcaagagcgtccacgccttcatcatcggcgagcacggcgacagcgagatcgcggcctggagcagcgccaacgtctccggcatcgcgctggacgatttctgcgagatgcgcggccactacaaccacgaccagtcccaggagaacatcgcggagaaggtcaagaacagcgcctacgagatcattgagaagaagcgcgccacctactacggcgtcgcaatggccgtcaagcgcatctgcgaggtcatcatccgggacgagaagtccatcctgcccatctcctcgatgatgcacggcgacttcggcgtggacaatgtcgttctgagcatgcccgccgtggtgggtgccgacggcctcgaagagctggtccccatcgcactgagcgagaaggaatccgctgacctccggaagtccgcagacaccctgcgcggcatcctggacgaatgcgggatctga

SEQ ID NO: 99 - DNA, 801 bp, Faecalibacterium prausnitzii
  misc_feature: SEQ ID N?462145
ggcggcggcacccccagcctgctggccccggaggatgccgcccggctgatcgcggcagcgtctcccctccccggtgccgagatcacgctggaagccaacccggaaacggtcaccgaggcatcgctctgcgccttccgggaagccggcatcaaccgcatctccttcggcgtccagtctgcacgggacagccagctgaaaacgctgggccgcccccacacggcccggcaggcgcgggcggcattcgcagccgcgcagcgggcaggcttcgagaacatcagcggcgacatcatgctggccctgccccattatacgcaggcggagttcgacgagacgctggaactgatcgagagcggcggtgccacccacatctcggcctatctgctcaagatcgagccggactccgcgtttggccggcatccaccggaggggctgccctcctcggacgaagcggcggacgtttatctctacgccgtcgagcagctggaacaccatggctaccagcagtacgagatctccaactttgcaaagcccggctatgagggcaggcacaacctcatctactggaactgtggggattacctcggccttggcccggcggcgcactcctgcatgggcggcaggcggttctattaccctgccgacaccgaagcctttcttcacgacaccgcagcccccgttctggacggcggctgcggcgcagaggattatctcattttacagctgcgcctgcgcaaggggctggacctggcggagtacaaggcccgcttcgggaaggaattttccacttcgcagcttgccttt

SEQ ID NO: 100 - DNA, 648 bp, Unknown
  BMI gene
  misc_feature: SEQ ID N?462320
atgctgaaaatcgcaatcgcagaagatgagaccagcgcacggactgcattaaaggaatatcttgaccgttggcaagcagaaaacggccagccggtgcaggcggtgttttttgaaagcggctctcagctactggaaaacattccccaagggttgcagctggcattgctggacatccagatgccggggctttccggcatggagaccgcccgctgcctgcgggaaacgctgccggagttggagatcgtgtttatcaccagccttaccggctatgcgctggaaagctacgaggtcgctgcactggattacctggtcaagccggtcagctatccgcggttctgccgcagccttgagcgagcctgccgccggatctgccagcaggcagagcacattctgaccattaaaaacagcgacggtgtgttccgtctgcgcgcgaaggatctcgtctatgtggaggtgtttagccaccggctggtactgcataccacagcgggtgtggtgagctacagcggcaccttggccgcactggaaaagaatgtgggaaacggatttttccgctgccatagctcctttctgatcaatctggaacaggtgacccggctggacggtgctgatgttgtgctgggcagtgaacggctgccggtaagcaaa

SEQ ID NO: 101 - DNA, 204 bp, Unknown
  BMI gene
  misc_feature: SEQ ID N?466171
atgaaagaagaaaagaactatattgccttgaacgactatgaacacggcatcgtgatcgactctctcaatgaaaagaggaatgaccttatcagcgagggaaagacgactgatgcagtggatgaactgatcgtcaaagtcggtcacgcccccaaaaagaaattcaaggtgattgaaagggacaaacgccgagatgaagcaagatga

SEQ ID NO: 102 - DNA, 1782 bp, Unknown
  BMI gene
  misc_feature: SEQ ID N?466172
atgaagcaagatgacaagcgtaccgctgttatcctctccctgatcggcattattcccgtcgtatggcttgcgcttaaaattgcgccatctgtcggcggcggtcttgcagcgatactgccggaactgatgagcgtatttgaaaatccatttcatattgagctttgcgaggacagtgtaaaaactgtcctcgttttgcttctctgctacggaatgggtatcggcatttatttctctacacgcagaaattacagacgacgggaggaacacggctcggctaagtggggcgaggcacgaaccgtgaacaagaagtacgcacaacatccaaagagtgcgaacaagctgatgacacagaatgtgagcatcgggctgaacgctaagaagcaccgccgcaacctgaacactcttgtttgcggcggcagcggtgacggtaaggccagattctattgcaaaccgaatctgatgcaggcgaacaccagcttcgtgatccttgacccgaagggcgagatcgttcgggatgtcggaaagctgcttgaagcaaaggggtatgaaatcaaggtgcttgacctaatttcgatggagaaaagccattgctacaatccctttgtgtatttgcggagcgacaacgacattcaaaggctcgtcaccaatctgttcaagagtaccacaccaaaaggctctcaaagcaacgatcccttttgggatacggcagcttcaatgcttttgctggcgcttgtattctatcttcactatgaagcaccggaggacgagcaaaactttgcaatggtgatggagatgcttcgtgcaggagcgattgaggacgaggaagaaccaagaccttccccgctggacaatctcttttccgagttggaatacgagaaccccgaacacatcgcattgaagtattaccattcctatcactccggttcggctaagaccctgaaaagcattcagatcacccttgccgcacggcttgaaaagtttaatcttgaaagtcttgcggcgttgacgaccaccgatgaactggaacttgaaacgcttggtgagaaaaagacggctctgtttgcgctgataccggataatgatacgagcttcaattttttggtcagtctcctttatacccagttatttcagcagctattttattccgccgatcacatccacggcggcagcctgccgattcccgtgcattttctgatggacgagtttgccaatgtcagcctgccggacgacttcgacaagattctttccgttatgcgttctcgctcagtatctgtcagcatcatcctgcaaaacttggcacagctgaaagcgctgtttgaaaagcagtgggaaagcatcgtcggcaactgcgatgaatttctctacttgggcggcaatgaacagtccactcacaaatatgtgtctgagctgctgggtaagtccacgattgataccaacacctacggcaagagcagcggcagaagcggcaattacagcacgaactatcagatcagcggcagagagcttctgacgccggatgaggttcgtatgctcgacaaccagtatgccattctctttatccgaggtgagcgacccgtgcttgatttcaagtacgacattctcaagcatccgaatgtggcaatgaccgcagacgggaacgccggtgtatatacgcacggcgaggtaaagtccgatgtggctactatcgagcttatcagctttgacaaaaacaaggctcctgaaatcgaagtagccgaaaccaattacgaactcctctccgatgaggacttcgataccaactga

SEQ ID NO: 103 - DNA, 246 bp, Clostridium butyricum
  misc_feature: SEQ ID N?482432
atgtgcggaggtgttcttatggatactatgagtgtgaacggaaaagattttaccgtcattaagcttctcggaaaaggcaagggcggttattcctaccttgtttcagacggagaacacaattatgttttaaagcagattcaccacgagccgtgttcatactataccttcggtaacaaaattcaaagtgagcttaacgattacgaacggctgaaaaaatgccggactcagactgccgaagcttattga

SEQ ID NO: 104 - DNA, 429 bp, Unknown
  BMI gene
  misc_feature: SEQ ID N?483703
atggcagagaaagaagttgtaaatgttataaaattacaaattgaagctggtaaagctactccagctccaccagtaggtccagcattaggttcaagtggtgttaatataatgcaatttgttaaagaatttaatgataaaactgcaaatcaaccaggaatgataattccagttgttataacagtatataaagataaatcattcactttcataacaaaagttccaccagttgctgtacttattaaaaaagcattaaaaatagaaaaaggttctggaaaaccaaataaagataaagtagcaaaaataacaacagaacaagttaaagctatagcagaacaaaaaatggaagacttaaatgcagcatcagtagaagctgctatgagtatggtaaaaggaacagctcgtagtatgggagttgtagttgtagattag

SEQ ID NO: 105 - DNA, 306 bp, Unknown
  BMI gene
  misc_feature: SEQ ID N?488420
atgaaaaagaaagccgcaaaaatttttacagcatttattatgacagcaattatcgcacagggaaccgttatggttgcaagtgcagcagaaacagattcaacccccgacagcgttatagtgattgaaaccgcaactcctgacagttcatttttggaaagcggtgccgattcaactgctattcagccaagagctgatgttatagtaagaaaatggcgtcgtggaagtcgtggacagctccagtacagaagatggaacgatacaaagcaagaatgggttgacgacgaatggattgactacaaaggttga

SEQ ID NO: 106 - DNA, 795 bp, Coprococcus eutactus
  misc_feature: SEQ ID N?489505
gcccctgctgacccgacaagagagggctatcagttcaacggctgggataaagcattcccgacaaccatgcctgcggagaatctgacaatcacggcaaaatggaaggttaattcgtacacgatcacctttgacaccaccggcggcagtgaaattgctccgattacgcaggactacggcacggcgattgtcgcccctgctgacccgacaagagaaggatatacctttatcggctgggatatggaaattcccacgaccatgcctgccgagaatataacgcttaaagcacggtggaaagacagcgaaaagcccacgggcgaaattaaaatcagcgagaacagttggaaagcgttcctcaacaacatcaccttcggtctgttctttaaggacacgcaaacggtgacgataaacgccgccgacaacagcggcgagtcggttacggttgaatatctgctgtcaaataaggaactgacaaaaacggagcttgacggcatgaccttcacagcgtacaccgcaccgttcggcattgaccccgataacgaatatattatctatgttagactgaccgataaggcgggcaatacggactacatttgctcggacggtatcgtgctggacggaacaagccccgtaatcaagggcatagagaacggcaagacctattgcgaggcacaaaccgttaccattgacgagaagtatatcgataccgttattgtcaatgaaacgaaggtcacactcgatgaaaacaacagctttgttctctctcctgcggacgacgaacagaaaatcattgtcacc

SEQ ID NO: 107 - DNA, 459 bp, Unknown
  BMI gene
  misc_feature: SEQ ID N?497277
atgactggaaaatacatggcctatgttggctcttattcctatacgggaaaggcaaaagggatcaccgtatatgatgttgatgtggaggcaggaaaattcatctaccgctgcgaagtggaagtggacaactcttcctatctgaaatcatcccagaacggaaaaatcctgtactctatcgccgatgagggcgttgtcgcgttccgcgttcttccaaatggaagtctcgcacgtttaaacagtgctaagatcaagggcatgcgcggatgccacctttctacgagcaaagcagatgactatatctttatctccggtttccacgatggaaagatcacggtccttcatctgaacgaggacggatcggtcggagatatcgccgacggtgtcttccacaagggacttggctccgtcgctgagcgaagcttccgtccgcatgtgagctgcagccgcctgactccggac

SEQ ID NO: 108 - DNA, 1302 bp, Unknown
  BMI gene
  misc_feature: SEQ ID N?527922
atgatcggagccactcttttaacagctgcactaaccggttgctcaggaggaaagaccgctgatgctcctgcttccagtacagaccagaccacagctgccgaagctgccagcacagatgctgcttccggaggcaaagtagccattgagttgttccatcagaaaccggagaacgtagagctttacaacactctggtaaacaaattcatggaagaaaacccggatgtacaggtaaacgttactctggcagaatccaccacaactacactgatctcccgtgtagcagcaggaaatattcctcagttagtatctgtattcccatggagtgcatcctataaagatatgttcagggaaggtcttttcatggatctgacggatcaggactttatgaaacgtgtaactccttccgttctggaacgctgcgaagtgaatggaaaacagtactctcttccactgaccaccaactcctttggtctgtactacaacgtagatatttttaatgaactgggacttaccattccaaagaccatggatgaaatgtggggtgtatgcgacaagttagttgaagccggcatccagccattctccttcccggataagaaagcaatccgtatcaaccagcagtttgaccgtatgctcattggctgtgtggaccatgacttctatagcaagtgtgatgaacagatcaacggaagctacaacattaaagatgatcctaatatccgcaaatatgcagaaaccatcttaaagctgcgtgaatatgcaaatcctgattctcttggatatgatgacgaacctgcttacgaagaatttaccagtggaaaatctgctatgtacattgatggttcctgggcagtaactacattcgagaccatgaatccggacctgaatttcaactgcaccgctattcctgctattacaactgatgatttctgggtcgctggtactgttgatactgcttattgtatttctgctgactgtacaccagaacagcaggatgcatgcatccgcttccttgatttccttgtacgtgaagatattgcacaggaattcagtgacggtgacaaaaacccaactctgatccagggcgttgaatacaacgttccacagcttaaagagatcaacgactacattaatgaaggcagatttgctccttctttagcaagtatctggacacaggatttaagaaacagcctggttgtatctgtacaggccctgatcttagataaggatgtagataccttcttagacgaattccagtctttagtagaagaatactatactcctgctgaatctgaatcctaa

SEQ ID NO: 109 - DNA, 330 bp, Unknown
  BMI gene
  misc_feature: SEQ ID N?530930
ttggtaataaaaaagggagatgcaatgaaagagaatagagtatcaaatgaattccgtcaaggaagagaagcaacgtttgccgctttattaatggaactgtgtctttgtggggagcgaattgcttccataatgggaattagaaattggtatgatcaggtgggaactgttagaatttttctttgtattttgattttttgttattattatataattaaaaaaccaagattattagatacgcctgaatggtatgagctaatgaaaaaagatagagtgatttatggaatgtggatcttggaaatgataatattagttagtagtattggaacttga

SEQ ID NO: 110 - DNA, 786 bp, Unknown
  BMI gene
  misc_feature: SEQ ID N?546887
gctttgaagatgaagaaatttaaccttaaaaaatccgcaaaatatatcatctgcactttgctcaccttgaccgtagtcgcaaccgttgtgtttctcccacgcttttattattcggtaacggacaatcgggattctgtcggaaacacggcggaaacatttaaacttaccgctgacataactacttcgagcggcggagaatttttgaaactcgtttcaaacgaagataccgtttgggttcttcaaaacaatgctccgaaagcagaaactgtaatcagctatgccaaaaaagcgataagcaatcttgcaaattcgcttaaagacacaaatttattttccaatattgcaggctacattccgcagttttttacatttgacagctgcagcggttacaaacttacaatgcgcggaacacttgacggtaatgtaatcgtttcgtccgattttatgtttgtaacatgcaactatgccaaagagggcgaacgatacggactaaacataacaatgctgtttgacacggaaacctttacgatttatgagcttaacattgatacaacctacctgtcggacagcggtaccgagaatgaaattccgcagtatttggttattccgtacagcgacagttatgaacaggagttgtccgatgcactcataaaatactggggtgtcagttccgattcaataacggttaatgtaagtcccgaatctttcagcatcaacatctgcccacagccgtttttggaatacagcaaaataaacaacgaacaatttgattattatgtgttatga

SEQ ID NO: 111 - DNA, 201 bp, Roseburia inulinivorans
  misc_feature: SEQ ID N?553803
ttggaaaatcttcgtgattatacagtaaaacactttactgatgaagagcagtatatggaatctattaattataagaagttatttacacagaaagttcaacatctgaaatttatacacaaacttgatgaatttatagaacatcataatgatgagatagaagatcaagatgaacagattgtggttatatgtgtagagtctgcg

SEQ ID NO: 112 - DNA, 504 bp, Unknown
  BMI gene
  misc_feature: SEQ ID N?568486
ataaaaatattatatccagaactttgtcgctttatgcgggggaaaataggatttttaagtcatttttctgtactttttttgattagtttacttggaagttttcttatcttagtgcaaaaaagtttatcatatatatcatttataaaattaataaaagaaataagaccgatagagtatattcgtgttaaaaagtataaaaaagtgaaaaaaataccaatattgaaagttgatagtatagaagatccatttattgttggtataaaaaatccgtatataataataccgaatatagatgaagaaacaaaaaaaatagtactcttgcatgaagtgggacattacattaaaagagatttatttttaaagtgtttttttgaaatattatgtcttttatactggtggaatccgttagtatacatagttcggtattatttttctaacatattagaaataagaaatgatttaattgtttgtaatgagttatctgaaatagaaaaaattcattat

SEQ ID NO: 113 - DNA, 588 bp, Unknown
  BMI gene
  misc_feature: SEQ ID N?569928
atgagagattgtaatgattcttttaatgacatattagacggcttttccaatgcaactcttgttgaaaagccttgtaagattgtgaaagtaaattcgcagtattgcgttgatgttgaatattatgacaacaacgagccttactacctttataatgtgcctgtaaaacatttgcagacacaaagtgcttttgttttcttggggctaaaggcaggcgactgcgggacagtaagattttttgataacgatgtaacgggttactatgctgatgacgagtatgtaagcgatgaaacaagaagccatgacataaatgacaatttgttttctttcgggttttatccggcactttcacagtatgtatttcctcatggtgatgtggtaataggcacgacctcgggagctgttgtcaacctgacagctgcaggaatatctatcagcggcggtgatgtttctataaccgggagcgggaatattacaatctcaagcagcagcgtctcaatcggagcagacacaacaattgacggtaaaaagtttttggaacacacacactcaaacggaaaccagggcaacccgacaggcggggtgatttaa

SEQ ID NO: 114 - DNA, 933 bp, Haemophilus influenzae
  misc_feature: SEQ ID N?569929
atggctgagacaagaacctggaaacaaaactcattaaaatttaatataatgctgcaagttgcaggtgccgatcttagtatacaagatctggatatagattttgatgtatacaaaaacaataaatcagaaaacaataaatcgacaatcacaatctggaacctgaacgacacaacatatcaaagattgttggaaaaaacctatgcagtagatttgtacacctggtacggcgatgacgaaccatctttaatgttcagaggctttgttgacaaagataaaacctcaaaacgcaacataaacggtaggataaatacagcaaaaggctttttggaaagccctgtaagacaggacataaaaggttcttttgatattcctacaataattgaacttgtggacgggcacgttgcctacacacaaacaaaaataaacaaagattaccgaaccaaagtaacctcaactcaaattctaaaagactgtattgaggcaatgggtgttggaactgcaaaatttagcgacaagctccctgtaaaagaatatccgacttttaaagccgttggtgcacctcaagctgttatgcaacaggtttgtaaacctctcggcatcaaatttaatatatcaaacgggctgattcaggtggttgcccctgatgaggaatttaacggggagtttgctatacttttaaaccgtgaaaactcaatgcggcccgacagggtaggagaaaatgaacttgttatatcaacaaggcttattccgtctttgaatccttatgactgggtacaatgtgattttaatgagttttcgggtgttgaaagtgtgcgtcaggtgcattccaaaggaaataactacggtacacagggctctacggaaattattataggctttgataaattaaagaaaaaaactaaacgcaagaaaaagaaaacagaaaacttatga

SEQ ID NO: 115 - DNA, 615 bp, Unknown
  BMI gene
  misc_feature: SEQ ID N?570360
gcaggtaaagacaatgtaatttcagatatagaaggtctttatgcgtattcttttgactgtgcgcacatccctttttcaaaagaagacccgagacttgttgtatttccgcaaaacacgcaacaggtaagcgatattgtaaaacttgcaaacaaaaatcgtatccccattatagaaagaggagcagcctcaaaccacgcaggaggttgttcaccggttagaggcggaataattcttcatttttcaaaaatgaatcaaatacttgaaataaataacagtgatttaacctgcaaagtccaacccggtgttgttgttggtgacttgcaaaaagaagcactaaaaaaatgtctgttttttcctccggccccgtccaaccttgcggtatctaccataggaggaggtattgcactttcgtcaggcgggccgcgcgcatttaaatacggtacattcaaagattatgtgcttgatatggaagttgttctggctgacggaactattctaagaacaggtgctcctacggtaaaaaatgttaccggttacaatcttacccagctcattgttggttcagaagggactcttgcagtaataacagaagccactttaagacttattcctgca

SEQ ID NO: 116 - DNA, 504 bp, Unknown
  BMI gene
  misc_feature: SEQ ID N?576044
atgctctatgcagttcctaaagccaatgaagatgaaatcagtatgcaagataggctgttatttgatttgtcattagctttgttgataagtctggcaattttgataagagagaatcgcggtgaacgtaaatctattgccaaactgttattagtatgcgttgctacatatcttcaaattgtatatagttcggcattttatgaatggggaggaggtatatgcttaatcctgccgatacttcagattatattcggatatacgatatttaagttgtcccacaacgttgtgtcgctattcgtaggctgttctaatcttctgttttcaacgatatgggcaaatcagatgtttggcatcctatggtttcataacagatccagcgaccttgaaactatggctgtagcttctttgtatgccggagtaggagcattgcttgtggtggtaatctcgtcaataatgataatgaagtttaatccgaaagaccttaaaagctatgaaactgaccgataa

SEQ ID NO: 117 - DNA, 501 bp, Unknown
  BMI gene
  misc_feature: SEQ ID N?577683
tcactcttaggaacgaacgaccctttgtatgtgatcgatggtattccgacgattgtgtcggataattatatcggtgggcagtcggatattttaaccccgatggaagctgccaattatggcgatcaccgtaataatagcgttgagggagctttcctgcgtgggttgaataatctgtctgggttgaatatcaatgatattgagagtatcgatattttgaaagatgcttcggctacagcgatatatggttcgaaagcggccaacggcgtggtaattatcacgaccaaacggggacgacaggatacgaagccgttgtttcattttaactactatgtgggggtaacatcgccgattaaagagaaggtgctgaatgccggacaatataaaaccgctttgaaagaagcggcggctaattttttagcagccagggaattgtcaggtaaaccgatgacgggtagtcaggtcgaacaggcgcggaatattttgaacgatccggatttcttc

SEQ ID NO: 118 - DNA, 630 bp, Faecalibacterium prausnitzii
  misc_feature: SEQ ID N?580103
atgagtgaagcaccgcgctttggcacggctgggctttcggacagctaccgtgtccgcagctttgacccgcaggccatggcggagtatacggcttcctttgggctgacggcgtttgaataccagtgtgggcgcggtgtacgcctggggctggataaagccgccgccttaaaagaagcgtttgatgcaaaaggcatcactttctcggtccatgcgccgtactacatcagcatgagcagcctggaggaggacaagcggctgaacagcgtgaactacctgctgcaaagctgcgcactggtcaaggcactgggcggccgcagggtcatcttccacgcgggcagctgcggcaagcagagccgggaagcggcccttgaaaaagcgctggataccatgcgccgtgccgtggaagcgctggacgaagccggttacggcgatatgactctctgcccggagaccatgggcaaaatcggccagctgggtacgctggacgaagtattggccctctgcggggtggacaagcgcatcacgccctgtatcgacttcggccacctgaacgcccggaccttgggcggcatccagtccagggccgactacgccgccatccttgaccggatggatgaggtgctgggcgac

SEQ ID NO: 119 - DNA, 315 bp, Eubacterium siraeum
  misc_feature: SEQ ID N?594250
atgaatccacagcttaaaagaggaacgctggaactatgcgtgctggctctgctgtcagatcgtgattgctacggttatgagcttgtaaatgcaatttcgcagagtatacatatcacagaggggacgatttatccgcttatgaagcggttaaaggacgaggggtgcattacttcatatcttgttgaatcgaatgaaggaccgtcaagaaagtattattcactgactgatgtcggcagaaaaaagttagcagtacaaatcagtgaatggacagatttctacaaatcagtaaataagatactcggcattgaacgatga

SEQ ID NO: 120 - DNA, 345 bp, Eubacterium siraeum
  misc_feature: SEQ ID N?594682
atgcagcatcccgtcctgccggacagcaaaacaacaaagagaacgctgccgtacaatcggcaatatgtgatctttgccgtctatgaagtgctggataaaaacggtgccgaatatgaaaaaacagacgcatccaccattttagcagagatgtcggtatacggtaatttaagccggttttccgtctccgtaaatgaacaggaaacggaaacagaaatcaccgtaacgatgatacatccttgcgagggactgtctgacgccggtatccggcgggcaacgaccgccatagcggacagtatatcgcagcatttggaaaacgagcttgtgataaacaagttgaaggcttga

SEQ ID NO: 121 - DNA, 393 bp, Eubacterium siraeum
  misc_feature: SEQ ID N?594949
atggaagatctgaatgaaatccgtgagcttttcgcaaaagaccgctttgcaacagaaaacggtgcagtgatcgaagctgtaggtaaaaacaccgcaacagtcagtatgcacataaaatcacatcatcgcaatgcggcgggaacggttatgggcggcgcgattttcacccttgccgattttgcctttgcggtagcgtcaaaccacgagaaaataggcactgtatcactaaacgcaaatataacgtttttaagagcctccaagggcgataagctcatagcaacggctgaatgcgtccgtgacggaagaacgacctgttattatcgtgtttcggtcaaggataacaccggtgtgcttatagctgaaattacaacaagcggatataagacaaactga

SEQ ID NO: 122 - DNA, 330 bp, Eubacterium siraeum
  misc_feature: SEQ ID N?595409
atggtgatagcgatagttatcagtgctgttatcacattctcactgcgtgcattgccttttgtgatctttcacggcgacaggaaaatgccgaagtggcttgaacgtatagaaaagtcgctcccggctatgataatgtcgatacttataatctactgcctcaaggatatcagcgacaatatgttcggtgtcggtataccaagacttctcgcggtacttatcacaggcggaagctataagctgtggcataacacttttgtaagtatggcggcaggtacgctgtcatatatgggtctgctgtacttattcagccatgtgctgacaggtgcataa

SEQ ID NO: 123 - DNA, 507 bp, Eubacterium siraeum
  misc_feature: SEQ ID N?595644
atgctgatacttaaactggttatagaaattcttatcctgtgggtatggtttgcgctttttatgcttgcgcttgtcggcagaaaagggcctgtaggcggaattatattctatcctaaggttatgcaggacagagttgtggaaatgggtcttacgagcgctaaaaaaataaagcagcgcactgtcatttcgatgacactgcttttgatcggagatctgatattcccgatagtcatgatactctttatgaacggagcaagaggatattttgaatgcgcatggcagtattacgtcctgttctacggaatggagttcttcgactggttcttcgttgactatctttgggtagcaaagtcgaaatggtggataatccccggcacagaagatctgcttgacacctggcacgatcctaagtataaggctacaaagatgctgaagctgcttattatgacagtacccgttgcggctttggcaggacttatcgcatgggcaataggactggctttgtaa

SEQ ID NO: 124 - DNA, 1392 bp, Bacteroides pectinophilus
  misc_feature: SEQ ID N?596031
atggcagtaagcaagatatggaaagtgaaggttcgcctgaaagccgtcatcgactatgcgaccaatcccgaaaaaacaagggtgcaggaatacacgccggagcaatatcaggcgcttgccgatgttctgaaatacgcaaaggacgaagaaaaaacggagcgtgagttttatgtggacggcatcaactgtaatccgtcaactgcccgtgaccagtttgtgacggtcaaggaacagttcgacaaggaggacggcatccaagcctatcacggctatctgagcttcaaggacgagccgaacatcaatcccaaccttgctcagaaaatcggaatggaatttgccaagcgtgtgtggggcgaccgctttcaggtcgtggtaacaacgcacctgaacacgaagcacctgcattgtcactttgttgtgaactccgtttcctttgtggacggcaagcggatggcaaataacgaaaagcactggcggtacttccggcacatagccgatgagttgtgccgtcagtatcagcttgatgtgattgaaaacccgcagcgtggtacgggcaaaaactactatgcaaggaagctacacgaagcgggtatgccgaactatgtagataccgcacgggcggtgatcgacgacgcaatcgccaagagccgcagctatgccgacttcaaatatgttctccgtcagatgggagcgtattttgacgactcggaaaatcacaagtacacggtgctgcgtgtaaagggctaccgaaaaaatatccggcttgcacggcttggtgatgagtattcgcttgaccgtatcaaggaacgcatctatgacaatcggaactcggcaagattagagccgtttcaaaaaggctactaccatcgcccaaggcaatatgttctcttgacacgggaacataagatacggaaggtcggcggactttacggactgtatctgcactactgctacaagctcggctatctgccgaggtacaaaaaacaagacccagctcggcttcattatcttctgcgagaggatttaatgaagctggacgagataaccgcacaggtcaggctgcttggcagagagaatatctcaaccgccgagcagcttttctcatatcagcactcggttgaggaacagatcaatgctttaactgccgacagaacgcatctccgaaatgaaatacgaaaagtgaacatcacagatgcagagctgtcgcaggcaaaaggcagcatctcgcttctctccgagaagctaaaaaagctccgcaaggaagtcaggctatgcaatggcattgccgaacgctccggcataatggcggaaaatctgagggctgtccttgcggacgaagaaaaaatcaaaacaaacaggaaggagaaccgaagttatgaacaacggcggtga

SEQ ID NO: 125 - DNA, 810 bp, Eubacterium siraeum
  misc_feature: SEQ ID N?596742
atgaagatcaaaagaataattgcaggcattctcgttgccgctacatgcggtcttgctatggcaggctgtcagtcaggcacagcaacaagcggtacatcaagtgacacaacaagctcgaccgcagagagcaaggatgacagcaaggcaacaggcggtaagctcattatggctacagagcccggtttcgctccttatgaatatatgagcggtaacgatgttgtaggtatcgatgttgatatagcaaacgaagttgcaaaggaactcggtatggagcttgagatccagacaatggactttgacggcgcgcttttagccgtacagcagggcaaggtcgactttgcagccgctggtatctcggttactcccgagcgtcaggaggttatggacttctcgatcgaatacgctaagtcaaagcaggttgtcgttgtactcaagggtgctgacagagtaaagagcgttgacgacctcggcggcgacacaaagatcgcagttcagatgtcaacagttgcagacttctatgtaacagacgatcttaagaaggagccctcacgttatacaaagtacgttcaggcggcagaagacttaaagagcgacaaggttgactgcattgttatggacgagcttcctgcaaaggaaatggtaaagggcaacgacaacctcgagatccttgacggcgaggtattcacagacaagtacgcattcgctttcaagaagggcaacaccgagcttgaagacaaggtaaacaaggttcttcagaagcttatcgacaacggtaaggttgatgagttcacacttaaccacactaagtaa

SEQ ID NO: 126 - DNA, 228 bp, Eubacterium siraeum
  misc_feature: SEQ ID N?596786
atgcttgtagtaacacgaaaaacagacgaaagtcttacgatatccgacaacattgagataaccgttcttgaaataggcaaggacagggtgaagatcggcatctccgcaccgaaagatgtgaagataatccgaaatgagctgagagatgcacaggatatgaataaagaatcatcgcaggcactgcccaaggcggcaatggaagccctgctcggtatgaagaaagactga

SEQ ID NO: 127 - DNA, 438 bp, Eubacterium siraeum
  misc_feature: SEQ ID N?596787
atggagataatgaccagagatttcggtaaagtaaatgtagacgaaagcaagatattcaacttcccgtcaggactttttgcgtttgaagaatgcaggcagtttgctttgctcagtccgctcggtgaaaatgtataccctatgtggctgcagtctaccgaaaatgttacaccgtgttttatcgttttcgacccggctattatagacggagcttataagataacgcttaacagctctgaaaagaaactgctgaagataaacgacagctcaaacgtcagatgcttatccatagcagtcgtaccggaggactacaaaaagactacggtgaatatgaaatgccccatagttataaactcagacgaaaatctcgccgcacaggtcatactccccgaaaagtatgagatacgtctgcctatatatatcgataagggggcaaagtaa

SEQ ID NO: 128 - DNA, 219 bp, Unknown
  BMI gene
  misc_feature: SEQ ID N?598043
atggagaatacttcgcataagagcaacccagccattgaattctcctctggcttctgcgacagcgatttcaaaatgaaaattggtggaacggtatatgagatttctactcattttgatgccgaaggcagccggtgtgtattgcagcaattccgtgacctgatactttcagaggacttgcttgaaaatcgcataattgcagaaagcgcaaaggcacggtaa

SEQ ID NO: 129 - DNA, 1035 bp, Eubacterium siraeum
  misc_feature: SEQ ID N?598171
gtggagaaaatggcaaagagaagaagcggaggcggcgaggaagaaaagggcaactggcttgatacatacgccgatatggttacactactgctgtgctttttcgtattgctgtactccgcatcatcggtagacgaaacaaagtggcaatacatatatcagtcctttacgtcaagcggcacttatgtaaatccgtttgtaatggacgaacagcctaagaataatgccgcagataccaacggcaacgccgaatctcccccgaacacgcaaaacggcggtactacaagtgaagaaacagagggtctgccctccgacttcaaccagctttacagctttttaaagacaactacggaaaagaacgatctgggtcagtatgtttacattgagcagacaccgacaaggatctttatccgattcaataatacgataatgtttgacggcaacagcgcagtactgaaagaagagggcaagcaggtgctcaacaagtttatgccgggcataaaggctgtgaacaagtatataaagtcctgcgaagtatcaggtcatactgccaaggcggtatccgaggtgaacgactgggatctttcggcggcaagagcgtcaagcgtagtaaagtatatggactataaccgctgtgttgacagcgaaaagtttactgtagaaggaaaagcgtgctatacgcctatagcggataatacgaccgcagaaggcagagcggcaaaccgacgtgtcgaaataatgatcgtaagggcacagctcgatacgacatctcaggctgtcattgatgatatattgaagtatgaatacaggctgaacggcgcaaataccgatccgtatgagcgcaacgacggtaacagctcggatgtcaacagcgatgttgtaaatgagataatcgacaatatggaaagcagatacgacggcaactcaggcgaaggcaactcaagcgtcaacgaggcaggtccgaagtacgagccgtcatacacaggtatccctacagatatattgacatctgcaccggcagaaacatcagaagaataa

SEQ ID NO: 130 - DNA, 537 bp, Unknown
  BMI gene
  misc_feature: SEQ ID N?598533
ggcaacgatttgtaccgcgagatgagcgagtctggagtcattgaccagaagaatccagagaaatcgaaagtcgcgcttgtgtatggccagatgaacgagcctccgggagcacgtatgagggttgcgttaactgcgcttacaatggccgaatattttagggacatgcaagggcaggatgtcttgttgttcatagacaacatatttagattttcgcaagcaggcagcgaggtcagcgcattgcttgggcgttcgccgtctgcggtgggctatcagccgacactcgcgcaagagatgggcgagttgcaagagcgaataacttccacaaagaagggatcgataacgtcatttcaggcggtgtacgtgcctgctgacgacttaaccgaccccgcgcccgccaatacatttgcgcacttggactccacgatagtgttggatcgttcgatagcggcgttggggatatatcctgcgatagaccctctcgcgtcgacatcgaatgcgctttcgcccgacatagttggcgcggagcattttagggta

SEQ ID NO: 131 - DNA, 219 bp, Unknown
  BMI gene
  misc_feature: SEQ ID N?598878
gtggatatatatatccgccctcagatcagagatgatctgagggcggtttttgattatacggaactcataaaaattccgggtgtgatgtataaagcgtcagaaacgaaaggaaagaaaagcaatgagtatgaacatgataagaaagctccctacaccaaaggaaataaaggagctgcaccctctgtcggaaaagatagtggaaaccaagaaaaagcgtga

SEQ ID NO: 132 - DNA, 600 bp, Eubacterium siraeum
  misc_feature: SEQ ID N?599210
atgaaaaatcaggatacgatcatttcggatggaacgctcacaaacgaagaaaaggaaaagctgcagcaggagtttttcgagcgtcagcagaaagaactgcataaaggcaagctgtttatgatagcaagcgttgttgcactgtacgcaaacgcggttatcactgcggctttgtatccgctgtatctgagaaatcttctgcgctctatattctttataaccgaccccaaaaaggtcgatgattttgctctgcccgagtcggcgataatgtttatcacaacgatgataatatttattatcctatgtataaatatcggtatggcgatagccaccaatgtctgtgccgtaaagaagaaaggtgcaagaccggctgctgctgtttcgtttatacttgccgaagttatcaaccttttgattgcggtgatgcagttgagctcggcgctgacctacagcgatacagcggcagaaatcgcgatgtttgtaaacattctgttctgctgtgtgtgcggagcagggatctatgtcacgatattcaggacgaatatttcagattatacctatgcggcagtgtctgaagcgtctgaaaaagccgaaaaagcgtaa

SEQ ID NO: 133 - DNA, 1191 bp, Clostridium phytofermentans
  misc_feature: SEQ ID N?613127
atggacttaataacagaggttcgatgggattttccggggcttgaaacacaggaaaagctaaatgagcataaaaccagcgtcctgaaatttatggataaacgacaggctgtttgtgtaaaagaagaagccgaaattgcaggagttatattgttttcgagggaacacaacatgatctgctgtctcgcagttgcaccccgataccgtcgccgcggtgtggctacaatgcttatggttgaggcgcttgccaatttagacagggcaaaagaaatatcggtttctacatttcgggctgatgatgtaaaaggaattgcaccaagaacattgtatgagaaattcggttttgttgcggatgagcttatagaggaattcgattacccaaatcaaaaatttgtccttttccccgccggcgcagagcgaaaagccagacagatgtctattaacggtatggttcgggaaatcagccgtattcttgcggactgtgaccctacaatatatttgtacggttcgtctgcattgaatgatttcagattgggttggagcgatattgatattttagtcctgacggagaagcaaatatccgagtcacaggcaaatttgcttgtaaatctccgccggactatgctcgcagatgaacccgataatctttattaccgttcttttgagggcgctatgctcaccagaagtgcctttctcgcaaacgctgatgaccgagtggtttattggggtacaagcggagagagaattaccgacaggtatttgctagatggctttggcaaaacagaactgattgagagcagccttcttttgtacgggaaggatatacgaaaagaactgagatatccggatttacatgagttgtatgccgatgtaaatcgtcactataagactataagaaagtacgcacaaagcaccggaagaaatttttattctttcggttggctgttggatatatctcgttgcatatacatacttcgcacaggcaagattatttctaaaacaaaagcggcagaatgggcgcttcaaaacaatctctgcccggatgtgcacgctctaacaaccgcattgaatgtccgcaaatgcccgttaaagtaccgatatgataaagatacattcgactatgctgaaacacttggcgaggttgttcagcgttttgcagatgtgttagaaaaagaattgaaagcaatcgaataa

SEQ ID NO: 134 - DNA, 213 bp, Mesoplasma florum
  misc_feature: SEQ ID N?618702
atgaaggtcttattgatcgtaaaactctgttgtagaggaagaacccttatcataggtaatgatgataagctgacggtactctaccagaaagccccggctaactacgtgccagcagccgcgggaatacgtagggggggagagttatccggatttattgggcgtaaagcgtgtgtaggcggtttattaagtttaagattaaagcccggagcttaa

SEQ ID NO: 135 - DNA, 567 bp, Bacteroides intestinalis
  misc_feature: SEQ ID N?618916
atgaagaatatgagaaatttatataatctaggttggggattggccctctgttccctgttgggagcttgccagtcagacgggataccggaggtggaggcaggttccacccttgagctgcgatcggtctctttggctgacgacgctgttacgaaggctgtgactacctctgtggataacgtgaaattgtatttgaagaactccagtgatacatgggtgaatccggtgtattccaaatccggagtaacatggggatgtgaatccgcgccactgctgggtagtaccgctacggatgtgtatgcttattatcctacggaagaagaaggtaaggccattaacgtaacagcctcctccggcgtgtactctgtcgaggtcacggtccgggatgcggatacattcgatggtaaacagatcgattacctttatgctacgccggttcaggcttccaaaacctcaaaaataatcagccttcaattgttccatgccttgacaaaggtgagtttctatatctataagtctgcgaatgccagcgatgagatcttaacgctgaaaaaaaatagatatacgtag

SEQ ID NO: 136 - DNA, 810 bp, Clostridium asparagiforme
  misc_feature: SEQ ID N?670852
tctgccaatgaggaactgctggtactgacaccggaaggtgcagttgaggcggcggattcgattcgggtggcattttcagacggtacggaggttcagggaacgatcagacagacggacaagctgtcaggcatggcaattgtgagcgttccgactgcggaactgggaagagcgcttttagaggaagttaaggcgattgaactggggaattcctattccgtaaaacagggagatctggtaattgcaatcggaggaccagccggcatggtgcattccacctgttatggttttgtatcctatatagcgaagaatgttcagatgacggatgggatgacccgtatcatttactctgatttaaagagcaatgcggcgacaggaacattcctcatgaacacgaccggtcagattatcggctgggtgactgacgagtataagagcgaaggcagcgaagatatgactgttgccatggctatctctgactacaagagcattctggagaaaatgagcaacggcaacgcgttcccgtactttggcatcaagggccaggaggtcagcgcggtcatgaatgagagcgggatgccgctcggcgtttatgtggtggatgtgaatgcagacagtcctgcctataatgcagggatccagtgcggagacattattacggttatgggcggtgagaacatcgttaccatgaaggatttccaggtgaagctggaggcatcgacaccgggagaggtattaccggtaacggtactcagaagcggcagagatgaatataaagagattgaatatcagataaccataggagccaggtaa

SEQ ID NO: 137 - DNA, 435 bp, Desulfovibrio desulfuricans
  misc_feature: SEQ ID N?684780
cgccagttcatgctggacgacatcctggtcaaggtagaccgctgctccatgctccattccctggaagtgcgcgcgcccttccttgaccgggacgtggccgaattcgcggcccggctgcccgtgcgccacaagctgcacggcttcaagcgcaagtatctgctcaaaaaggcctttgccgacctgctgccgccggagattctgcaccgcaacaagcgcggcttccagattccggtggcggcctggctgcgcggacggatgcgcccgctcatggaagatctgctcagcgaagcacgcctgcgcgagcagggcattttcaatccccgtgccgtgcgagcgctcatgaacgagcatatttcaggccgtgaggatcggcgtaagccgttgtggacgctgctggtcttccaactctggtggcaggcccgaaaaaacaattga

SEQ ID NO: 138 - DNA, 813 bp, Clostridium thermocellum
  misc_feature: SEQ ID N?694886
atggtggaaaacaaagatataggacaaagcaaaagtaataaaatagtatttgtatatagaattgtagtatcaattataatggtggttagtataatattagtgtatatattaaaccatttaggtcaaagtaaggaagttgatgctatgtttaattctacacaaaataatcttttagaagggattatagaaggtaatacttacgataatactattgctacagaacatgctacttcagaagaatctttgaaaaaacttagtgattggcgtttaatgttagtaaattatgaaaatgaaatgccgaaagattatgttccaccactttctagtatagatgaagctagacaatttgattccagagcaatagatagtttagtacaaatgatgttagatatgaatgctatcggaataaatcacatttgggcacaatctacatatagagatccaaaaaaacagaagcacttaatagaagaaagcatacaagagtatttagaacaaggaaaaactatggaagaagcagaagcattaactgcaaggtctataggagaaccatataaaagtgagcataacataggtttagcagtggattttaacgatgttaattatgctttcgaaaacgaaaaagcatttacatggcttatggaaaatgcagaaaattatggctttatattaagatatccagcagataaggaagatataacgaaaataaaatatgagccatggcattggagatatgtaggcccagaatatgcaaaagaaatgaatgatttaggcttttgcttagaagaatatatagaatatttaaagaataattag

SEQ ID NO: 139 - DNA, 492 bp, Faecalibacterium prausnitzii
  misc_feature: SEQ ID N?726129
atgcagatcttatcctctctttcgccgctggcgctggaacacgagggcggcaccgccgtcgccatgggcttttttgacggcatccacatcggccaccgtgccgtgatcaacggggccgtccagtgggccagagaacacggtgcggccccggcagtgttcaccttccggctgccggccgacaataagatgaagggcaagcgcctgctctccaccgaggacaagcacgccctgatcgaaagccttggggtggaatattacctctgcccggactttgaagagatccgcgcgatgacgccggaacagttcgtgtacggcatcgtgcaggactgccatgcaagggcgctgttctgcggcgagaacttcaccttcggggcaaaggcagcgggcgacccggatctgctgcgcaggctctgcgccccgctgggcgtggaggtcgtggtggtgccgatggcccagtttgaggaaaagccggtgtcctccacccgcatccgc

SEQ ID NO: 140 - DNA, 1008 bp, Roseburia inulinivorans
  misc_feature: SEQ ID N?735834
atgatgttaatgaacactgatgaatatttacatattgtcgagtcaatcaagcaggagattcgcacagcgcagtaccgcgcggcggtcagcgtcaatcgggagctgttgatcctttatcactccatcggtgaggtcatcaatgcccacaagacgtggggcagcaagttcgtggagaatcttgccgccgacatcaagctttcctttccggacgccaccggctactcagtgagaaacttgaagtatatggcaaaattcgcattgcgctttccggataagaaaattgtgcaagcggcacttgcacaaattacctggtatcatcacattgccctgatggataaggtaaagaacccagaggagcatatttggtacgccgagcaagctgcacagaacggctggtcacgcaatgtgttagtccatcagatcgaaagcggcctgtatcagcgacaggtgctggcggagaaggtatccaactttggaaaccgcttgccctccccgcagagcgagcttgcggtggagacgatgaaagacccgtacatctttgactttatcccattcaaagtggacatggtggagcgcgatattgaacaggcgctggtcaaggacgtgacaaagctcctgctggagttggggacaggctttgccttcctcggcaaccagtaccacctgaatgtgggcggcgatgatttctatatcgacctgctgttttacaacctcaaccttcgctgctatgtggtgattgaactgaaaaccggcgagttcaaaccggagtacgccggacagctgaacttctacctctctgcggtggatggcatcctgaagaaagagcaggacaatccctctattggcctgctgctctgcaagagtaagaatgacctcgtggcggagtattccctcaaggacgtgagcaagcccatcggcgtcagcgcctaccagatcaccagcagcctgccggaagaactggaacgccagctgccatctgtggaggatatccaaaagcggatcaggtaa

SEQ ID NO: 141 - DNA, 786 bp, Clostridium leptum
  misc_feature: SEQ ID N?740278
atgagccgatatgacgctgttgtgaaaatgtggcaggactggaatgtccggtcggttgacgacctttctttgcggctggacaatttccgcattctgtttgcctataactccggcaaaattgagaacgccgagatcaattaccacgacacccgcgagatttttgaaaacggtaaggtcgtgggctataccggcagcaccaggaccctgtttgagcagcagaatcagaaggtgtgctacgaccttttacaagacaagatcgttgcaaaagagccgttgtccgtcgggttgatctgcgctatacaccgtgcgttgacggagggcacctatgatgaacgccgctacattgtgaacggcgaacgccccggcgaattcaagaagcacgactatgtgaccggcaagaatgaggtcggttcacagcccgatgaggtagagagcgaccttgcggagctgattgaggaagtcaacgccatcggcgtgaaagcccctctgaaggcggaggcgtacctccacgcccgctttgaaaacatccatccctttgcggatggaaacgggcgcgtagggcggacgctgctgaactactggctgatgatcaacgactatccgcccaccatcgtctatgaagaggatcgccgcgcctactatgacgcactgcaagcctacgatgagcaggaggacttgatcccgctggtgcagttcctggaggctcagatggtcaaaacatggtcgcgcagcacggacggtaagaagtctacgccgcacaaaaaactgaactcgtttttgctgtga

SEQ ID NO: 142 - DNA, 273 bp, Unknown
  BMI gene
  misc_feature: SEQ ID N?744341
tcctctgtgtcgggttcggcgggaggggccgcggggggggcggccattctggggggtggggcggcgggactgttcccctccgccgatcaggcgtgtcaggccatggtgcagctggtctccaccaccgagcccatcgccgcccataccgcagtttataacgagtattatcagacctaccgggggctgtaccagtccctgcggcaggatttcgcccgtcaggcagagctggccgcccgcgctgacgccgctttgtcgggcatatcacacagctaa

SEQ ID NO: 143 - DNA, 1638 bp, Unknown
  BMI gene
  misc_feature: SEQ ID N?744429
atgaaacccgaaacggtgcttggaataaaatacagagaagaacccacggcaaaattgcaggaatggctaaaggaatatgctgccattgcggcggagtttccgggtgcggaggatttggcacaaaggctctcaaaacgcgccgaaaaagccggtgagctcattaccgagcgaaataggccggagccgccctcatcgtcgcacgatgatatgtattatattgagatggcaaagatcatggacgatatggaagcatcgttcgacggcgattttccgctgggaaacgaagccgacgcgagctttgcaggctgttatttttcggttctcgaacttgcggaaatacaatgcggactgcatcatctgatcgtcgccgggagctttaacggatataacttcgatgtgctggtacgaaagggatttcttgccgaattatatgaggactggccggaggcggtacgctgctatgagggcgtatcgacaagcaagagcgtacaggagcgtgaagacgaatgtcgccgcaaaatggcgattgaaggcaaacggtgttatgaaaaggcgcttgcatttatggaaagcggcgagtggaacgaggtgttcgcaccattgaatcgagccgccgatatgggtaatcccgacgccatggttgatttagcccttgcccgtgtatacggtcagtacggctgcgcaaaggatttgcaggaagccctcacgcttctgcgtgcagcggcgaagaaggacaacgcccgcgcctgctttgcgttatgtcatttacacgacagcggcgtatacgaggtgcaagccgccgaagccaaggaaatgtgcgaaaaggcggcagggctcggagatgaaaaggcaaaagcgcggcttgcagacggctttgacctccgcccgatccgtgaaattttgcaggagcagatcgacaaaggcaacattgacgccctttggcagatggcacagttatgtaaaaaggaaaatgatgaaaccggtgccgccgggtggtttaacaaagccattgaagcggggcaggttgacgctctgctgagcgtggcagcggtttatcttgacaaaaacggcggcttttacaataaagaactggcaagacagtatcttcgccgtgccgccgacggcggaagtgttcaggcgattatcggccttgccgattcggagcttgcagacacagatatcccgttttggcagcaggcggcacagcttcggaatttggaatattccgaaaaacagccaaagagaaaaatcagggagcagcacaaaaaacagatggcgtggtatcgtcttgccgccgaagcaggcgataccgacgcgatgaacgctctgagtatggcgtatcatctcggctaccccgaaacccgtgacgaccgtgaagcgtttttgtgggcttcccgtgcggcagatgcgggcgacggctcggcaatgtatcagacggcgcatttgtatgaaaacggctttggcacggacagggatattgacacggcacttctcctctacaccgaagccgccgaacagggcgtgcgctcggctatgataaggctttatgagatatacaccgaaggacttttacacattcagccggacggtaaaaaagcggcgcattatctgtggctttccggcgagggacgggactaa

SEQ ID NO: 144 - DNA, 114 bp, Unknown
  BMI gene
  misc_feature: SEQ ID N?745495
agaaaaagaaccgcagttagaagagtaatgctaactgtaaagcaaacagattttaatcatagagatggagtaattaacaagaaagaaacgttgttggtttctccatctcgatga

SEQ ID NO: 145 - DNA, 399 bp, Unknown
  BMI gene
  misc_feature: SEQ ID N?747791
tttaaattcctctatgctccgaaagaaatcctaggcgaagacggttatgtcaaggctgtagaacttgaggttatggaacttggcgaacccgatgaaagcggacgccgcaagcctgtttcaaccggcaaatttgaaacaatggatttagacactgtaattgttgcgctcggcacaggcccgaacccgattattcaaaaatcagcccaaaatgaggggctcgagctcgaaacaaacaaccgcggatacattattattgacgcagaaaccggaaaaacctcgatagacggagtttttgccggcggtgatgttgctccggtaggcgaatccaacgctatcaacgcgatgggagcaggaaaaagagcagcaaaagcgatggacgaatatttaaagtctttgtaa

SEQ ID NO: 146 - DNA, 573 bp, Unknown
  BMI gene
  misc_feature: SEQ ID N?749395
ttgaatacacaaaagaaaggacttgatagaatgcatacagttacaatttcagattcagttaagtacataggatgcgatgatcacgatattgatttatttgagagtcaatatgacgtaccaaacggagtatcatacaattcctatttaatattagataaaaaaattgctattatggataccgtagatagtcgtgcaacagagcaatggtttgaaaatcttgaacgcgagttagcaggaagaacacctgattatttaatcgtttctcatatggaaccggatcatgcatctaatattcaaaaggtttgtgaggcatatccagagatgcaggttgttgcaaatgcaaaaacctttgccatgattccacagttcttttctattgatttgacaaatagaaaggtaacggtcaaagaaggagataccttggagttgggagaacacgtacttacctttgttatggcaccaatggtacattggccggaagtaatggtagagtatgaaagcacagaaaagatattattctctgcggatggatttggaaagtttggaacattggatacagatgaaccatgggat

SEQ ID NO: 147 - DNA, 651 bp, Clostridium phytofermentans
  misc_feature: SEQ ID N?749585
gaggtgaaaggtggattagacatggcaacgaaggacgataagaaaacagttagatgttctttttgtaataaagcacaggagcaggttagaaaaatcattgcaggaccaaatgtgtatatttgtgatgaatgtgtagatatttgtgcagaaatcatggaagaggaatttcaggattttgaaaatgatagtgatattaacttattaaaaccaaaggaaatcaaagatttcttagatgaatatgtaattggtcaggatgatgcaaaacgtactttggcagttgcagtatacaatcattataaacgtgttcttatggaaaagaatctggatgtagaattgcaaaagagtaacatcattatggttggaccaactggttctggtaagacatatcttgcacagacccttgcaaagcttcttaacgtgccatttgccattgcagatgcgacagcacttacagaggctggttatgtaggtgaagatgtggagaatatcctacttaaaattattcaggcagcagattatgatattgaacgtgcagaatatggaattatttatattgatgaaattgataaagtaacaagaaagtctgaaaatacatctattacaagagacgtttctggtgaaggtgtacagcaggcattgttaaaaatctta

SEQ ID NO: 148 - DNA, 1236 bp, Clostridium phytofermentans
  misc_feature: SEQ ID N?750039
cctattccaggcgtaaacagaagttatttttcaagttggtttgatcaacaaagtgcattaagtttttttgatgccatgactggtggatctttttccaccatgtctgtttttgcgcttagtattacaccatatattacatcttctattattatgcagttacttaccattgctattcctagtttggaagagttacaaaaagatggagaagaaggcagaaagaagattaatgaatggactcgttatgtagcagttattctttctattatggaaagtgcagctatggcaattggttttggtaatcaaggatactttgaagatggatttgatttacagtccgttattatcagtgtagttgctttaacggctggtgctacattcttaatgtggttaggtgaaagaattactgaaaaaggcgttggtaatggcatttcaattatcttgttagttaatattctttcaagaataccagaagatttgctaacactatacaataagtttgtaaagagcgcaacaagttatggtggaaaagcatccgcagctgttgttatcgttgcaattttagttgcattagttgtatttattgttattttatctgatgcggaaagaagaatttctgtccagtatgcaaaaaaattacaaggaagaaagatggtgggaggtcaatcttcacacatcccattgaaagtaaatacagcaggtgttatccctgttatttttgctggttcattgttatcattcccaattgtaattgctagtttctttggtgttcgaccacagtctggtgatgatgcaactattttccagaaattcttgaaagtatgtaaccagagtgattggtttaacgtaaagaatatttatgaattcaagtatactttaggaatgttagtgtacattctgcttatcattttctttgcatatttttatacttcagttacatttaatccaattgaagtagcaaataatatgaagaagcagggaggatttatcccaggtattcgtcctggtaaaccaactacagactatttaactaaagtattaaattatgtaatttttatcggagcagtaggattgacaattgtggcaattttaccaattattttctcaggagcctttggtgctgatgtttcatttggtggtacatcgctgatcattattgtaggtgttgtattagaaacaatcaaacagattgattcacaaatgcttgttcgtcactatagaggattccttagcgaataa

SEQ ID NO: 149 - DNA, 456 bp, Unknown
  BMI gene
  misc_feature: SEQ ID N?750165
atgaattcagaatacgggcagagattgtctctgcaagaactcaagcagcgcaacacccagcagacagcgctgccggtgcaggcaccacctcccgaagcacgtcccacaaaagcggactgggagcgaatgatgaaatacatggatgcactgtggtaccatgcagatcggcagacggatctgttggagagcgtcagcaggcagatgtcgcagcttcccacgcgaacgcagctggacgatctgctgaaagcggtgcggcatctggagcagatgaccgaacaggctgggaaaccgaaagagaattctttttctctgcacagaatcagacttcccagactgcatctgccacaagtcagtattccggcattgatctctctgctgatggcggcggcagcactgcttctgctctggtggggcttggacaccgtctggagcagctccggcctgctgagcctgtga

SEQ ID NO: 150 - DNA, 1125 bp, Clostridium bolteae
  misc_feature: SEQ ID N?750765
atgatgagagcagttggaatcgtactagctggaggtaatagtaatcgattagcagaattatcaaacaagagagcggttgcagcaatgccgattgccgggggatatcgaagtatcgattttgcattgagtaatatgtcaaactctcatgtacagaaagtcgctgtcttgcctcagtataatgcaagatccctaaatgaacaccttaattcagcaaaatggtgggattttggacgtaaacaaggtggattatttgtattcacacctacgattacagcagaaaacggtaactggtaccgtggaacggcagatgcgattgcgcagaacctttctttcttaaagagcagccatgaaccatatgttatcattgcatcaggtgatggtgtgtataagatggattacaataagatgctggaataccatgtagcaaagagagcagatattacagttgcaacaaagacattgcctgcaacagaagatgcgacacgttttggtgtgattcgtaccgatgcagatgagcgtatcgtagagtttgaagagaaaccaatcgtaacagattccaataaagtatctgctggtatttacgtgattcgtagacgacttttgattgagttgattgaaaaagccatggaagatgagcagcatgactttgtaaaagatattttaatccgatataaaaattggaagcgtatttatgcatatgagttagagggatattggagcaatatttcaacagttgagtcttactataagaccaacatggattttctacagaaagatacgagagattatttctttaagcagtatccagatgtatactctaagattgatgatcttccaccagctaagtataatgttggctcaaacgtaaaaaatagtttagtatccagtggatgtattatcaacggtaatgtagaaaattccgtattatttaaggaagtgtacattggaaacaatgtaactatcaaaaactccatcattttaaatgatgcgtatattggtgataacacttatatcgagaactgtattgtggaaagtagggacacgatacgttccaatatgacatatataggtgatgctgacaacattcgtattgttgtcgaaaaaaatgagaggtatgttttatag

SEQ ID NO: 151 - DNA, 852 bp, Coprococcus comes
  misc_feature: SEQ ID N?750767
atgtgtaaaaatcaaaaagtattttgtaaaaacgaaaaagttgcgtttacaagtgaaaaaaacaatggtataatgagttgtattgtaagaactagagaggtgagagacgtgattaaaaaagagatgatagccatgctgctcgcaggtggacaaggttcacgtttaggtgttttaacagctaacgttgcgaagccagcagtttcatttggtggtaagtatcgtattattgacttcccacttagcaactgcattaattcaggtgtagacaccgtaggtgttttgacacagtaccaaccgttaaaactgaatacccatatcggaattggtattccttgggatttagatagaaatattggtggtgtttcgattttgccaccttatgagaaaagtggaaatagtgagtggtatacaggtaccgccaatgcgatttatcagaaccttgcatacatggagcagtacaatccagagtatgtattgattttgggtggtgaccatatttataagatggattatgaagtaatgcttcaattccataaagaaaacaaagcagatattacagtagcaactatgccagtaccgattgaagaagctagtcgttttggtgttgcgattacagatgaaaagagaagaatttctgaatttgaggaaaaaccagagcatccaagaagcaatctggcttctatgggtatttatatcttctcatggccagtgttaagagatgctttgattaagttgaaggatcagcctggtttggacttcggtatgcatgtacttccttattgtatggaaaagggagatcgtttatttgcatatgagttcaatggatattggaaagacgttggaacacttgct

SEQ ID NO: 152 - DNA, 1344 bp, Unknown
  BMI gene
  misc_feature: SEQ ID N?752580
atgcttttacgaaagcatttaaacagtgctcgtattctttctattacacaaccagaaatggaacgtattatccaatttgaaattgaacacctaaatgagcttggtgatatctgtacgaaatatctaatcgtagaaatcatgggaaaacatagtaatattattttttgtaatcaagactataccattattgacagtattaaacatatttccagtatggtaagttcagtccgtgaagttttgccaggacgcccttactttataccaaaacagcaggaaaagaaaaatcctttgacaatctccgaacaggatttcatggaaaccgttttttcaaaaaataaaccacttgcaaaagcaatttatacttctctcacaggttttagtccattaatggcaaatgaagtatgttgtcgggcatctctagattcagaaatgccagcaaatagtttatctgaaatggaacaactgcatctccagcacaacttttcccgtatgatggaacagattgcatctggagattttcagccaaatatcatttataaaaatgatcagccaaaagatttttctgctttactactctcctgttatcaaacattggaagtaacgcaaaatgattcgatttcttttatactggaaaactattacgaagcaaaagaactctattcccgtatgcatcagaagtcggctgatttaagaaaaatcatcaacaacgcgttggaacgaaatcgtaaaaaatatgatttacagatgaaacagctaaaagatacagaaaaaagagaaaaatataaaatctatggagaactgattaatacctatggctatacagttccagaaggggaacgttctatgacctgtttaaattattatacaaacgaagatattacaatccctctggaccctacactcactccattagaaaatggaaagaaatattttgaccgttacggaaaattaaaacgaacttacgaagctttgacaatacagacaaaagaaaccgcagaagatattcagcatttagagtcaattagctcctctttggatattgcagtaaacgattgtgacttggcacagattaaggaagaattgatttcttatggttacatgaaacgaaagggaggaaattccaaaaagaaaaaacaaaaaatcgtaaataaacctctgcattttatttcctctgatggatttcatatgtatgtaggaaaaaataacttccaaaacgacgaacttacttttaaatttgcatctggaaatgactggtggtttcacgcaaaaggaattgctggctctcacgtaatcgtaaaaaccaatggagaagaacttcctgatcgtacttttgaagaagctgga

SEQ ID NO: 153 - DNA, 1149 bp, Unknown
  BMI gene
  misc_feature: SEQ ID N?752649
atgaagaagcaagggcgtgtagtgttcttttacatttttgcaattatatgtatattggtagcagtaacatattctgaaaaaatgtttcagggacagtcccagaattacaatacagcggatcttcttaaagatgttaaaaaggataaagtttcctctgttgtaatcaaacaaaataaggaagtaccaaccggtgaggttgtagtagaattaaagtcgggaacgcgaaagagttatgcagtgtcaaatgtaaatgatgtggaggcatccctggatgagattcaaacgggaatttactccgtttcagatgtggagggtgagagtctgttatcttcactgatgccatatatatttgcacttttaatattttttattgttatgatgtttctttccagtcagatgggtgcaagtggtggcggaaacagcaaaatgatgaattttggtaagagtcgtgccaagatgtcaactgacgcggatgcaaaagtgagatttgcagatgtggcaggtttggaagaagaaaaagaagagttaaaagaaattgttgatttcttaaaagcacctaaaaaatatactgcggtaggtgcaagaataccaaaaggtgttattttagtaggccctccaggaacaggtaagacgttacttgcaaaggcagttgcaggagaggctggcgtaccattttttagtatttcaggttctgatttcgtggaaatgtttgttggtgtaggtgcatcgcgagtaagagacttatttgaggacgcaaagaaaaatgcaccatgtattgtatttattgatgagattgatgcagtagccagaagaagaggttctggtttgggcggcggtcatgacgagagagagcagaccttgaaccagatgttagttgagatggatggttttggtgtcaatgaaggtattatcgtaatggcagcgaccaaccgtgtagatattcttgaccctgcgattcttcgtccgggaagatttgatagaaaagtaaatgtaggacgtccggatgtaaagggtagggaggaaattttaaaagtacatgctaagaataagccattaggtgaagatgtaaacttacagaatttggcgcagacaactgctggatacactggtgcagatttggaaaacttgttaaatgaatcagcaattcgt

SEQ ID NO: 154 - DNA, 948 bp, Ruminococcus torques
  misc_feature: SEQ ID N?753326
atgagacacttaattgatccattggatttcaccttggaagaaacctgtaacgttttagatttggcagatcgcatcttgatgcggccctccgagtattcccatgttgcagacgggaaaaaactcgcaactcttttttatgaacccagtacaagaacacgcctttcttttgaggccgccatgttaaatcttggcgggcaaaccttaggatttgctggtgctgaacaatccagtgctaccaaaggagaaaccgttgcagacacggctcgtgtagtaagctgttacgctgatattattgcaatgcgccacccaaaggaaggcgctccacttcgtgcctctatgtatgcaaaagtaccagttatcaacgcaggagacggcgggcataatcatcccacccagacactaattgatatgatgacgattcggcaaaagaaaggccgcttagaccatcttactattggattttgcggagatttaaagtttggtcgaactgtccactcccttgtaaacagtcttgttcgctatccaggaaatcaattttatttcatttccccagacgagcttcgtgtaccagactatcttattacggatactttacatcctgtcaatgctacttatcatgaagtaagtagtttggaagataccttaccaaaactggatgtcttgtatatgacacgagtacaaaaagagcgtttcttcaatgaggaagattatattcgcctaaagggcagttatatgctaacaagaaaaaagctgcaacttgctccgtccgatatgcccgttctacatccattaccaagagtagatgaaatttctcttgacgtagatgaggataaacgtgccgcctattttgatcaggtgcaaaatggtgtttatgtccgcatggcacttatcatggcactactaggtattccagaccctacaacgggagaggaggtatttgagaatgct

SEQ ID NO: 155 - DNA, 1737 bp, Unknown
  BMI gene
  misc_feature: SEQ ID N?754420
atgaacacacttgttattgtattaattgcagcagttgtattagtagcagcttataccttttatggacgttggctggcaaacaaatggggcattgacccaaaggcaaagacaccggcagtgaagcatgaagatggaaaggactatgtgccaaccaatggatggacggttttttgtcaccagttttcttctattgcaggtgcaggaccagtcacgggtgcaattcaggcagcagcctttggatggcttccggttcttttatgggttttaatcggaggcgtattctttggtgcggtaacagactttggtgccttgtatgcttccgttaaaaacgaaggaaagtctatgggtatgctgattgaaaagtacattggtaagtttggacgaaaaattttccttgtattttgctggctttttactttgattgtcattgcagcttttgcagatatggtagcgggaacgtttaatgcatatgaagtagcggacaatgccacaaagttatcccaagctgcaaaaacaaatggagccgcaggaatggtttctattatgtttatggtatttgccgtaatttttggattggcaaaaaagaaattcaactttagtggttggaaggaaattgtatttggattgttatgcattgttgcttcctttgcaatcggaatgaattgcccattgatttttacaaaagatacgtggagttacattacatttgtctatattttctttgcagcggtgcttcctatgtggttgttaaagcaaccacgagattatatgacaacgtttatgtttatcggaatgattgccggtgcagtaatcggtttgtttgtggcacatccaaccatgaatttaccagtatttacaggttttagtaatgatacattaggaaccttattcccaattttgtttgtaacagttgcctgtggtgcagtatcaggcttccatagtttggtttcttctggaacctcttctaaaacggtagaaaacgaaaaagatatgctaaaagttggttatggtgcaatggttctggaaagtcttttagctgtcatcgctctttgtgtggctggtgcagccgcttcatcggatggtacggcagcagttggaaccccattccagatattcagtcgtggtgtagcaggattttttgaaatgtttggtgtacctgtttatgtagcaacggtatttatgacgatgtgtgtatctgcattggcattgactagtttagatgcggttgcacgtattggtcgtatgagttttcaggaattattcagcgtagatgatatggaacatgctgctccttggagaaaattgctttgcaatacttatttttcaactatcgtaacgttactttgtggttatgtattaactaaaatcggatatgctaatatctggccactgtttggttctgcgaaccagttgttgagtgcattggtattgcttactctttgtgtattcttaaaggtaacaggacgtagtaataagatgttgttcccaccattgattattatgctttgtgtcacctttaccgcattggtacaaagaacaattgccatggtaaaagcaattcaaagtgcagcagcagttgccatcccagcaggtcagacaacttggggtgctgtatttattgccaacggtttgcagttgattattgcaattctcttaattgcacttggcttaattattgtaataaactctactaagagttatgcaaagagccagaaaaattcagaagcaacagcataa

SEQ ID NO: 156 - DNA, 936 bp, Unknown
  BMI gene
  misc_feature: SEQ ID N?754646
atgaataagtattacagatgtttaagaaatagcctcaaaacaattattattttaggcataagcttttttatttcattaataatagaagaatttttaggagccagtaccctaatccctgctattatggcattggcaatttttttgatttctaggatgacggatggttttttatatggaatcattgcatctgtgctaagtgttttgttattaaactttgcatttatgttaccttatttcgcctttaattttagtatttcagaaaacattatttcggctgtaattatgctcataattacgattatgacaagtacattgacaacccagttaaaatggcaggaaaaggttcggatggaaagtgaaaaggaaaagatgcgtggaaatctattgcgggcggtttcccatgatcttcgtactccattgactgctatttatggttctggttccacgattgtagagaattacaagcaattatcagagcagcagcttttacagttagcaaatggaatatgtacggattcgcagtggcttatgagaatggtagaaaatattttatcaattacccgaatcgataatgagggagtaaaaattacaaagacctctactgtattggaagaattaatagattcggtgttgatacggtttaaaaagacgtatccgaaccagaaaataatagtagacattccacaggaatttattagtattccgatggatgcggtgataattgagaaggtgcacgtcaatatattggaaaatgccatgcaacatgctactggaatgacggagattaaattgtctgtttatgtaatgggtgacaaagttgtatttgaaatcaaggacaatggatgtggcattgaaaaggaacgattaaaaggaatatttaaagattattttgaaataaaggaaggacccattgataatcagaaaaagagtatggga

SEQ ID NO: 157 - DNA, 1398 bp, Bacteroides capillosus
  misc_feature: SEQ ID N?754647
atgtcattgacaaatattataagtttgcttggaggattggctctctttttatatggaatgcagatgatgagccagggattagaggcagccgcagggaataagatgaagcggatattagaaaaattaactgcgaaccgttttcttggggtatttgttggagcattgattacagcggtaatccagtcctcctctgctactactgttatggtagttggctttgtaaattctggtatgatgacattgagccaggctgtatggattattatgggtgctaatataggaaccaccataacagggcagctcatcgcattagatgtaagtgcgattgcaccgttagtcgcatttttaggagttgtatttattgtatttgtaaaaaaggaaaaatgccattatataggaagtatactggctgggcttggtattctttttatagggatgaatatgatgagtacggcaatggaaccattggggcagtctgctgggtttattaatttactaaccagatttgaaaatcctattttaggtattttagcaggaattgtttttacggcattgatccaatcctcgtctgcatcggttggaatcttacaggctttggctgctagtggagtgattactttaaatagtgctgcgtttgtgttgtttggacaaaatattggaacttgtattacagctttgttagcatccataggaacaaatcgaaatgcgaaacgaactacaattattcatattacttttaacgtcataggaaccattttatttaccgtattatgtatcgtaacaccattggttgcatggcttcaggacataacacctactaatgtgcctgcacagattgccaatttacatacattgtttaatgtagttactacattgctgttattgccttttggaaatgccattacaaaattttctgtggctatcttaccagatggaaagagaaaggaaaagacagagaatacgttgtctgatattcgagtaggcaataaagagggactaggtcaatcggctattagtttggaagaaaccaaaaaggaattgcaatatatgttaaatatggcacaaaaaaatgtgcacagtgcatttgatgtatttgccaataataaagaagatacatttcaggaaatagaggaaagggaagaacagatagataacttaaataaagatattaccagatacataaccactgttattccacatgagaatacggagacaggcagtaaggtatttcattcctatttcacgatttccagcaatatagaaagaatcagtgaccatgctatgaatattgcaggatattcaaagacaaaggaagaaattgaagcttctttttctgaaatagccaaagaggaagtagagtatttgcagagcgtttgtgataaggcgttttttcatttg

SEQ ID NO: 158 - DNA, 1128 bp, Unknown
  BMI gene
  misc_feature: SEQ ID N?755381
atgaaagatgcgacaaaatttcaagaaaaactaaaagaactgcttgtatgcgcaaagaagaaaaaaaatgttttagaaagtcaggaaatcgtagaacattttaaggacatggatttagatgtcagcaagttggaaaaaatatatgattttctggaaaaacagggcattgatatattgcgtataaaagaagaaaaagaagcagatgatattttgcttgagccagatgatgctgatttagatgaggaagaggaagtagaagatattgaaaatattgacttatctgttcctgattcagtaggtgtggatgatcctgtccgtatgtatttaaaggaaattggtaaagtaccacttataacatcagatgaagaagtagagttagcgaaacgaattgcggatggagacgaggaggcaaaaaaacagctttcagaggcaaatcttcgtcttgtagttagtattgcaaaacgttatgtaggacgaggtatgcaattcttggatttgattcaggaaggtaaccttggattaattaaagcagtagaaaaatttgattatacaaaaggatataagttcagtacctatgctacttggtggatcagacaggcaatcacaagggcaattgcagatcaggcaagaaccattcgtattccagtgcatatggttgagacaatcaatcgattgttgcgtacacagcgtcagcttgtacaggatttaggacgagcaccgaccgtagaggagttagcagaagaattgaagcttccagtagctcgtgttcgtgaaatacagaaaatatcccaggaaccagtttctttggaaacgccaataggagaagaggatgacagtcatttaggagatttcattcaggatgaccatatgccagtgcctatggatgcagcagcagcaacgttacttcgggaacaattgacagaagtgatgagttcactgacagagagagaacagcgtgtgcttcgtttacgatttggaatggacgacggaaaagcacgtactttggaagaagtaggaaaagaatttgacgttacaagagaacgaatccgtcagatcgaggcaaaagcgttgcgaaaattaagacatccgagtagaagtagaaaactaaaagattatttggagagctag

SEQ ID NO: 159 - DNA, 807 bp, Eubacterium ventriosum
  misc_feature: SEQ ID N?756805
ccaagttatgtatcttacttaccatgtgtgacattggcagatggagttccgattgtagtggaattaaaagaagaaaatgatttcaaattgacaaagcaggatgtattggaaaaaataacggacaagacaaaaattctagtattaccattcccgaataatcctacgggttctattatgacaagagaggatttaaaggaaattgtagatgtggtactagaaaaggatttgtatgttatttctgacgagatttatgcagagcttacctatcagggaaagcatgtatccattgcagaatttcctggtatgaaagatcgaaccattgtgatcaatggtttttcgaaatcttatgctatgacaggttggcggcttggttttgcctgtgcacctaaaatcattttagagcaaatgttaaagattcatcaatttgcgattatgtgtgcacctactaccagccaatatgcggcagtagaggctttgcggaacggagatgatgatgtaagacatatgcaggaggcatatgaccaaagacgaagatttttagtccatgaattgcgtcgaattggatttgaagtgtttgaaccatttggagcgttttacgtctttccgagtatcaaacagtttggtatgacatcggatgaatttgctacaaggcttttggaacaggaaaaagttgctgttgtaccgggaactgcttttggggcctgtggagaaggttttttgcgtatatcttatgcctattctattgatagtttaaaaatcgccttggaaagaatagaacgtttcgtaaaacagctaaaaaattcatag

SEQ ID NO: 160 - DNA, 1152 bp, Ruminococcus torques
  misc_feature: SEQ ID N?758713
atgaaaaaaatagcaatattaggttctacaggttctataggaacgcagacattagatgttgtgcgaaataatgatgatttagaagtggtttcacttgtagcgggaagtaatattgatttattagagaaacagattttagagtttaagcccaaagttgtatcagtctgggaaaaagaccgtgcagaggaattgaaagcacgtttgcaaaattgtcaggtggaagtattatttggcatggatggaatgacagcttgtgcaacgatggaggaagtggaaattgttgtggcagcagtagtgggtatgataggaatacaaccaacgattgcggcaattaaggcaggaaaggatatagcacttgccaataaggaaaccctagtaacagcagggcatatcattatgcctttagtgcaggaatgtggtgtgaaattattaccagtagacagtgaacattctgcaatctttcaatcaatcaatggagaaagaaaaaataaaattacacgtattttattgactgcttctggcggaccatttcgcggtagaaaaaaagaggagctacagaatatacaagtggaggatgccttgaaacatccgaactggtctatgggaagaaagattaccattgattcctctactatggtaaataaaggtctagaagtaatggaggcaaaatggttatttcaagttccaattgacgatattgaggttgtagtgcagccacagagtgtaattcattctatggtagaatttgaagatggagcagtgatggcgcagcttggaacgccagatatgcgtttgccaatacaatatgcattatattatccagagagaagaccgcttccaggggaacgcctgaattttgaacaattgacgcatcttgattttgaaaagccagatatggatacatttacaggcttaagacttgcttatgaagtagggagaaaaggtggaagtttaccgactgtatacaatgcagccaatgaaaaagcggttgcgatgtttttagatcgtaagattggatatttggaaattatagatgtaatagagtatgcgttgtccaaacataagtggatagcaaatccaacagtggaagagatacttgctattgagcaggaagtttatgaaatgattgaaaagaaatggccatctttataa

SEQ ID NO: 161 - DNA, 594 bp, Clostridium phytofermentans
  misc_feature: SEQ ID N?758854
atgacgctatccggaaagacaatcggttttgccatgaccggttctttttgtacttatgagaaagcttttgaacaaatgaaacttttaaaagagatgggggcaaccatcatccccattttttcctatgtaccacaggaaatggaatgccgttttggttcctgtaaatactttttagaaaaagcagaagaaatttcagaacatcgtcctattcttaccatttcgcaagcagaacctattggtcccaaaggaatgttggatattctcctcattgctccttgtactggaaataccatggcaaaactctccatggcaatcactgattctccagtactgatggctgcaaaatcacaacttagaaccgaacgtcctgtagttctatctcttgcaagcaatgacagtcttggactcaactttaaaaatttaggagaactctatgcaatcaaacatgttttctttgttcctttcggtcaggacgatttttgtaaaaagccaaattctctggttgcacacatggatttcattcctgcaacgctggaaatggctctggaagaaaaacaaatacagcctgttcttcaatcgtatgaagcacattaa

SEQ ID NO: 162 - DNA, 924 bp, Clostridium hiranonis
  misc_feature: SEQ ID N?760259
atgaatatctggattgacagcaaaaacaaaaataggtatgatagcaacagaacattaggtaaggatgtgttgaatatggattttcaagaatatgaattgctactggaccttgcagaaacaaaaaatataacaagaacagcagaacggttggggtattctcagccaggagctagtcacatattaaaaaaaatagaggaagaattaggttttcctgttatttttcgagaaaaatatggagttacactgactccggcagcagaattgttacttcccaccatgcgggaattgatgaggatacaagaaaaactggaacaaacgatttatagtatcaaaggactagagtatggaaagatgacgattggagcctactccagtgtatccatacatttgttgccaatgatattacgagaatttaaagaattccaccctaatctgattatcgatattcgagagggtggtgcggaaaatattttaagctggattgacagcaatgagatagattttgcttttatcagtcgtccgtacgccagaacaatggattttttttcttatgggaaagatccactggtagctgtattgccagaaggatatgcattagatcataaacgaaacttcccgatgaaaagctttgaaggacagccctttattctttctgcagatggaaatgattttgatattcataatgcattagagtgttcgggaattacaccaaaatataattattcggtgttagatgaccatacgattttatccatggtggaaaacaaattaggattgagtatactgactcaactaatctgtactggataccattataaggtggaatgcattccggtagacccgccttattatcgggatatgggaattggaatgaaaagttataaaaaattatctccagcagcaaaaagttttgtagactttgca

SEQ ID NO: 163 - DNA, 1380 bp, Unknown
  BMI gene
  misc_feature: SEQ ID N?760836
atgattccgtatttaatcattgggtatgatattttgctaaaggctataaaaggcattaaaaatcaacagccttttgatgaatgtttgttaatggtaattgctacgttaggagcgattttacttgccttattccaaactggagattatgtagaggccgttgcggttatgttattctatcagattggagaatggttccagagttatgcagtaggaaagagtcgtagaaacattagtgatttaatggatattcgaccagattatgcaaatgttgagcaggatggcaaattggaaaaagtagatccagatgatgtggagattggaaccattattgtagtacagccgggagaaaaggtacctttggacggtattatcgtagagggaagtgcaagtttgaataccagtgcattgactggagagagtgtaccaagagaggtgacagttggagatgagattataagtggttgtatcaatatgacaggtgtttttaaaattgagacaacaaaagagtttgaagaatcaactgtttcaaagattttagacttggtggaaaatgcaagttccagaaaatctaagtcagaagattttattagtaagtttgcacgcgtgtatacaccagcagtcgtatacagtgccattgcacttgctttattaccaccgatttttagtatgttatttttaaatgccagtgcaaccgtatttgctacatggatttatcgtgcgcttacttttttagttattagttgtccatgtgcattggtaatcagtattccacttagcttttttgcaggtattggaggtgccagtcacgaaggtgtacttgtaaagggttctaactatttggaattgttggcacagacaaaatatgtggtatttgacaagacaggaacgttgacccaaggagtatttgaggtaaatgcaatccatcacaatacaatggaagaagaaaaattactagagtatgcagctttagcagagagtgccagctcgcatccgattagtaaaagtttacaaaaagcatatggcaaagaaattgatcgtttccgtgttacagagattgaagaggtcagtggaaatggtattacagcaaaggttgatgggaaggaagttgccgcaggaaatagtaagttaatgaaaaaacttggtattccttacaaagactgtcatcatgttggtacaatcattcatgtggcaattgatggagcatatgcagggcatattgtgatttccgatattgttaagaaaaattccaaagaggcaattagacaactgaagaaaaatggaattgaaaaaacaattatgttgactggtgatgctgatgcagttgctagaaaagttgctacagaactgggaatagaccagatgtatagtgagttgttaccg

SEQ ID NO: 164 - DNA, 747 bp, Thermoanaerobacter tengcongensis
  misc_feature: SEQ ID N?761022
atgaaaaagaaaatcgcgattattctagtacttgctatgattgcgggatgccttgcggcatgcggtaagcaagcgtcagaacccggcactgacggggacggcaaagagatcaaaatcggcgcactttaccccacacagagcatttccttctgccaggagatccgtcgcggcgtggaagaggccgccgcagagtttggcttcaaaacagttgagtgtgtttacgatctcgatgccgataagggtgtggagatgatgagaaacctcattgtgcaacaagtcgatgccattgtcctgcattcggtctattctgatgcatttgcagcgcctacgcaagaagctatggatgcgggtattccggtcattaccgttgacggtatggtcaatacggaagtaactacctttgttgcctctgataatacacaggggggaactttggccggtgagtttgtcggcaaatatcttgagggcaaggggaatgtgctcattattacatccgaacctggcaatgttaccatggttgaaaggaatgatggattccacgccgggcttgcaggttatcccgacatcaagatcaccgaggttatggatgatggcctgagtggtatggagggctatgccaacactgtcgagaacgcgctcaatgcaaaccccgactacgattttatcattacaaattactctgattgtacttatggcgtgctttccatattggagatgtatcctgataaatatggcaacatcaaggtc

SEQ ID NO: 165 - DNA, 333 bp, Unknown
  BMI gene
  misc_feature: SEQ ID N?761910
atgggagggtttcattttggacatcgctatatcaatgatgtattgccttatttatactggagtattcttgtatttgcgggcggcaaggaaaagaaaccaataccagtaccaaaagaggatacgatgctaaatctggaggaaagtgatgaaaccatagaaccaatcgttacagaaaacaatatggataccccatctgatgttagttctacggatgagccagaaattgatgcaccactagcagactacacttatccactacatatggctttgtgtgcattgggacttgccctcaatgtagttggtactattgctgtaaatatgggttgggtataa

SEQ ID NO: 166 - DNA, 1548 bp, Collinsella stercoris
  misc_feature: SEQ ID N?763343
gtgttacaatgtgaaaaaacagggcaaaaatggaacggaatattttgtttagaaggaggtttttctatgacaaaaaaggagcaaaacttagaagaaaaattagaagcattacatctgtacatagaagaagaaccaaaaacggaagttatgcgtgaggaagagaaaaaggaactattgcatacggtcatggacaagattgcaatgcaaaaaaaacagatggaaaatggaacaggaaaaaatgtgcggacgattacacaaaaaagaaagaagcgtggtattatgaaaaaaaatcatacaaaagtggctgttgctgtcataggtattttattagctggaggtaccataacagcaggtgctagagcaatctacttaaattcacatttggctgattactttagaattgcttctcctgcaaacaaaaaggatgcagataaattaaaagatacaacaaaaaatatggtacaaaatctaaataaaacagctaccagcaacggcattaccttaacagccaaacaggtaattggagatgattacggttgctatttattactgaccgtatccggaatcaaaaataaagctgcagaagacgatttgctttccactccagccttcaaaaatctaaacattaccatttcaggtaaagacagcttacaaatttcagacttaaaatgcatgggactggaaaacggtgtttataactatattttaaaaataggttgtgaaaatctggagggcagtaagattacgattcatgcaaaagatttcggctatcaaaagaaaaagtttacctccgtggcaaaaggaaactggaaattgcaatggaatgtatcctatagcggaaaaacaaaagagtatgctgtaaacaaaaatattaatgtatatggtggaaaagcagtttgggatactttaagcattacacctttatccgcatctatttctctgactatgaaaacaaaaaataaaatagaaatgtcagaatcttcggcaaatgatgccctttatgtggactttgcaaatggaaaacgcttaaacactaaatatatagatgcagaagatgtctatgatgacacaacaaaaatttctatgagttttcctaccatcacagatattgatgatattgtaagtgtaacctttgcgggtgtaacctatccaatccatccagaaaaagcagttgcaaaaacaacgtatacgaacaaagagatgaacttttctcttcaactgtcagatgagctgaaacaggttattacaacaccgaaaacagagaattataaagatgctgatttcaatgccaaaggtcaaagagtaaactttattggtaaaaaagacaatacaaaaatgactttattcaccatattccgcataaaaggtatgtggtcaccagaagaagctgaagataaaaatccaatggcaaactatattgcctatcgagatggctacacctattttattcaatatggtgaaatcgtagatgaagcacaaaataaagcctttgcaaatcttttaaataaggaatcgggcattgaacaatttattgcattcttaaaataa

SEQ ID NO: 167 - DNA, 633 bp, Ruminococcus obeum
  misc_feature: SEQ ID N?763741
atagattctggaaactttgattggatggcacatgctgataaatttccaggcttatgtactccagacgaatcctaccatggtattacttatgcagaaaaatttggaaaagaaggagcatttattacaaaatgtacttctcagcttatgcgtgatctgggatgtatccaatctcctcaacacgcatttatcttaaatttaggattagagtcccttcatgtcagaatgccacgccatgtagaaaacggacaggctgtagcagaatttttacaaaaccagccagaagtgtcttatgtacattatccaactcttgctggtaacaaatactatgatttagccaaaaaatatcttccaaacggaggatgcggtgttgtttcctttgaattaaaaggtggtcgaaaagcagcagaagcatttatgaaaaacttaaaacttgctgctattgaaacacatgtggcagatgcaagaacctgctgtcttaatcctgcaacctccacacaccgccaaatgaatgacgaacagcttgctgccgctggcataccagcaggactaattcgtatttcttgcggactagaagataaagaagatctaatcgctgacttaaaacaagctctagaaagcatttccgcaaaatag

SEQ ID NO: 168 - DNA, 1041 bp, Heliobacterium modesticaldum
  misc_feature: SEQ ID N?763946
atgaaaggagaaatgaaaatgtttcaaaaaggagaaaaaaaggatattacagatttaattcaggatatgctggaagggtataacaagacccagaccagtatgcatgaaattgataatatagcaacgcagagtcgtatgcttgcgaatacggcagccagagaactcggacgtatgggtggaatggcaggcggatttcagattatcacgctggaaattaaaaatttctcagaggcgaatcgcacaacaaatcagaaaaatatgcaaaatgtggaagcattaaatacagagattaatagtatgcttggtgttcgtactgcggatgttgcctacgatttaattgataaaattgatcgaaatttggcagaacggtattgtaatgtgcaagtgtggtgtacatttgaagccattatacgttatgcaaaagaagacacaccccatcgaaaagaggatgtcatgcatctgctaaaaagcttgcataaaatttatgctgtttatcacgatatatttatggtagatcggaatggaacgattgtagcagcggctgagagagaggaatatataggtcgtgatgtaagtcaaaaagactggttcttggcagcgaaagagcaggaaaatgtagtagtatccgatttgcattattcaaaagtaattgatgattatgtagtttcctatacaaatagaattgtagatgaggatggaacctttttgggcgtgataacaacaaggtttaactgggaaaatattcttgctatgattgatgaaaccaagatcgggaaaaagggagaagtatatttgattaacaaggatggaatggtaatcggagccagagatcgaggacttatcttccataaaaatatgctgttagaatgtcagggagcacaaaccattttagctggtgaggtaaaagaaaactatggctatgccatagagatgaatgaacaggcacagttgacacgtattcttggttatgcaaagacaaagggatacaatagttataaaggacaggagtgggcggtactggcattggaaaatatacggtaa

SEQ ID NO: 169 - DNA, 1977 bp, Unknown
  BMI gene
  misc_feature: SEQ ID N?764336
ctttttgtttgcattattgtggtgttcataaaagatttgattttagaaagaggtcaggcagaagaaacggttgaggagaatcttttacatggaataaaaaaggacggtatattgatgaagatacaggaatactggaaagattggaagcctagaaaaagtcaaagcaagatgaagatgacaaagtttgactggattgcgattgctgccattacacttgtgtatgccgctattgctctgtttaatttgggagataaggatgcacctcagacttactgggaaacttatacacagggtgatactatatattttgactttacaaataaaacatcaaatttaactaagttagcatattttgatggaagatacgaaaatcgtgaattttatttggaagaaagtgcagataatgttacatggacacctgtttctgtaaattcacaggatgtggcatctttaggtggagaggcatctaaatttacaatgagtagtgtattttgttgggcgtcagcagatatttcagtcacacagccttatgtacgacttcgttgtaattccaacgaaacagtaatcaatgaacttgtattttttgatgaacagggaaattctgtacaacctgtaaatgcagcagattatgcaaatctgtttgacgaacagaaaaaatacccggatattacaactttccgcaatagtacatattttgatgaaatttatcatgctagaacggcatatgagatgacaaagaatttgtacaattatgaatggactcatccaccattgggtaaatttattatgtctattggtattcgtatttttggtatgtgtccatttggatggcgtatcatgggtactttgtttggtattgctatgttgccaattttttatatgttctcaagaaaagtgtttaagaagggatggcttgcagcatttacaacaactttgtttgccgcagactttatgcattttacacagacacgtattgcaacaattgatgtgtatgttaccttctttatcatactgatgttctattttatgtatcagtattattgtatgagtttttatgatacaccgttgaaaaagacgtttgtaccgcttttgtttagtggtatcttcatgggacttggttgtgcaagtaaatggccaggcgtatatgctggtattggtttggcgattgtgttctttattgttgtgtttagacggtatatggaataccattatgcgtggttacatccaaaggaagagacgaacggcattaaaaatgaagtgataattaagagttttcgtaaaaatttgattaagacattagcattttgtgtgttagcatttattatcataccgggaacgatttatacattatcatacattccatttaacaatggacaggatatgggattgattcagcgtatgattaaaaatcagattgatatgtggaattatcattctaaattggatgctactcatccattttcttctacttggtaccagtggccaatcatgcagagaccaatctggtattatacggcaacaattaagccagcagtagaaggcgtatctggtgcaattcagggaaatatcagtgcgtttggtaacccacttgtttggtgggctggtattccagcatttgcctatgtgctttatagaagtatccgttataaggataagaatggaattttcttaagcgttgcttatatggcacagcttacaccatggatgggcgtagctcgttgtacatttatttatcactatttcccaagtgtaccatttattacgattatgattggttactgtatgtatcatttgtatgagtcttgtaagactgagaagggaaggaaaaatgtaaaacttgcttgcataatctatgcagcttgtgcgattggattatttattatgttctatccggttatttccggttatccgattgatgtaacttatgtaaagaaatttttacgttggtttagcagttggcaattagcatctgtataa

SEQ ID NO: 170 - DNA, 1242 bp, Unknown
  BMI gene
  misc_feature: SEQ ID N?765330
cctcatgatggcggtatcatggctgaagtaaaagctgtaacagattacaatacagtaaagacaatggataaggcagaagcacaggcaaaaggtttatacgaaacaatcggtgctgctattgatgacaagtacatggaagcattaaagaaacaggttattcactgggatagtatcaaagaagcacagaaagaccttaaaattgtttatacaccacttcatggaacaggtaatattccagcaagacgtgtgttaaaggaaatcggttttgaaaatgtatatgtggtaccagagcaggaattaccagatggcgaattcccaacggtaagttatccaaacccagaagcagcagaagcatttgaattggcattaaagcttgcaaaggaagaggatgcagatttagtattggcaacagatccagatgcagaccgtttgggtgtatatgttaaggatacaaagtctggcgaatacattacattgacaggtaatatgtcaggttgtcttttggcagattatgaaatcagccagagaaaggaaaaagacggaaagcttcctgaagatggtgctttaattaagacaatcgtaacttctaatatggcagatgccattgcaaaatattatgatgtgaagttgattgaagtattaacaggatttaagtttatcggacagcagattttaggctttgaaaaggcaggaaagggaacttacctgtttggtttcgaggaaagttacggatgcttgatcggaacacatgcaagagataaagatgcgattgtggctactatggcactttgtgaagcagcagcttactacaagacaaagaatatgacattgtgggatgctatgattgcaatgtatgaaaagtatggtttctacaaagacggtattaaggcaatcggatttgaaggaattgcaggattagagaagattcagaatatcatgacaacacttagagaaaatacacctgctgagattggtggatataaagtattgtcagcaagagattatcaggcagatactattaaggatatggcaactggagaggttacacctactggattaccaaactcaaatgttctttactatgatatgagtgataatgcatggttgtgtgcaagaccttcaggaacagagccaaagattaaattctactatggtgtagtaggagagtctttggaagatgcagatgctaagtcagcagcgatggcagatgccgttgaaaagatgattaatgggatgttataa

SEQ ID NO: 171 - DNA, 1359 bp, Dorea formicigenerans
  misc_feature: SEQ ID N?766445
atggaaatgagggatactatgaaaagcaccaaaccccaaacaaacattaaaaaaaatcatatggatgtcctctggcatgaatacgccgattccgcagatcatactcccattacgaaagcaagcctgtccgcaaaagcatctgtagtcggaagggttggtattatgatgctttcctgtggaacaggagcctggcgtgttcgcagttccatgaacgaactgtctgaacttatgaatatcacttgtaccgttgatattgggcttatgtctattaactatacctgttttgatgggaataacagttttagccaatctctctgtctgacaaatacaggtgtaaacacttcacagctcaatcgactagaaaagtttgtagctcatttttccaaaacaaaacttacggaaagttgtgaagaaatccactccgcattagatgaaatcgaaaaaattcatgggctttcctctccatttatattagctatttctgctgcattggcatgtggtgccttcacctttcttcttggtggcggcatcgtagaaatgctatgtgcttttgtcggagcaggaatcggaaactatattagatgcaagctttccaaacatcactttactttgtttttatgtattatttcgtccgtatctgctgcttgtctcagttatacccttttactaaaattattagagtttgccttttccgtacaactacaacatgaagctggatacatttgctctatgctgtttattattccaggttttccttttataaccagtggaatcgaccttgctaaactggatatgcgttctggttcagagcgatttatgtattcattgattatcgtaacagtttccactatgactgcctggatacttgctatgttgcttggacttaaaccaatctcttttcttccattaaatcttgctttatggcaatggattttatttcgtttacttgccagcttttgtggggtttttggattttctattatgtttaacagtcccgtcccacttgccattgcttctggtatcataggtgctgcgtccaatacaattcgactagaattgattgacctatgcgcttttccacctgctgccgctgccgctattggtgcatttattgcaggtatccttgcttctacgcttaaaggtgtggtcggctatccaagaatctctattactgtgccctctgttgtaatcatggtcccaggattgtatctgtataagggattttacaacctaggcattatgaatttaacttccgcagcttcatggcttgcatctgcattacttattattttggcattacctttggggcttatatttgctcgaattcttacagataacacgtttcgatactgcacctaa

SEQ ID NO: 172 - DNA, 1512 bp, Clostridium phytofermentans
  misc_feature: SEQ ID N?767171
atggaaaaatggatgttacataccaaaaaaggagactttagaaaaactgcggctgagtatgggatcagccctgtgttagccagaattatggtgaatcgaggtgtaaaagaggaagaacaaatacgaaaatttttaaagggtaccatggaagatttatatgatcctattttattgttggatatggaaaaggcggcgaatttgttacagaaagcaattgatgcaggagaaacgatagcaatagccagtgattttgatgtagatggtattttttccagtatggttttgcatacggcatttcaacgagtgggagcaaaatgctttgtagaaacaccgaatcgagtcacagaaggatatggattaaatcgtagaattgtggatgattctttgcagaagggagcaaaattgttgataacctgtgacaatggaattgcagcgttggatgcagtgcaatatgcaaaagataagggattgacagtgattgtaacggatcatcatgaagtgccttttgaagaagaggaagatggaagtcgtaactttgtcaaaccagttgcagatgctattgtaaacccaaaacaaaaagaatgtcagtatccatttccgaagctttgtggagcaggggttgcatttaagttggcacaggtgttgtatcaacgatatggagtagctgtagaggagcagagacagttaattgagtatacagccattgctacggttgcagatgtgatggatttagaggatgaaaatcgtattattgtaaaaactgggttaaaacttttggaacacacgaataataaaggattacaggcaattttaaaagtgaatcagttggatggaaaaacgatttctgcgtatcatattggatttatcattggtccttgtttcaatgcggcaggaagactggaaacggtaaaaattgcattggatttattaatgtgtgaggatgagagagaggcactggtgatcgcagaacaattgaaagcgcttaatgaaagtagaaaagaaatgacagtaaagggcgtggagcaggcaattgaaaaaattgagcattcgaccttaatgcaggataaagggttagttgtaaaattggaagattgccatgaatccttggttggaattatagcgggtagaattcgagaacgttaccataagccagtgcttgtatttaccgatgtggaagacggaattaaggggtctgggcgttctattgaggcttacaatatgtttgaggaattgaataaatgtaagaagctgctgactagatttggaggacatccgatggcagcaggagtgtctatggaaacggaaaaattagaggagcttagaaggtgcttgaatgaaaatacagtgcctacagaggaagatttatgcccggtagtatggatagatgtacctatgccaattggttatatttcggaagaatttgtagagcagttggaattattagaaccctttggaaaaggaaacacaaagcctatttttgcagagcagcattttcgctttttgagtggggcg

SEQ ID NO: 173 - DNA, 1053 bp, Clostridium phytofermentans
  misc_feature: SEQ ID N?768679
ttgattgataaacctgttaaagtgggaaatattcgtgtactgttaagaacaaataacggaaaagatgtgtatcatagcagcgtgacggtttgtagtgatactaaacttactctgatttgtggaaaaaagaagacaacttacaaaaaaggggaaaacgttgtaataaaggcggataaaaaatattttggcaaggaaaaacgattaaagatacaagcagaaaagggtggaaaaattactgtcatgtccataaaaaggggaaccgagaatccgtcctatcgaggcagtatggaactgacatgggaaaaaaagaaagggcttcttcttgtgaatgagttgtccttggaagaatatttatatgcagtcataggaagtgagatgcctgtttcttatggagaagaggctttaaaagtacaggcagtctgtgccagaagttatgcatacaagcaattgattcatggtggatgcagtacatatggtgcacatgtggatgatagtgtttcttatcaggtgtacaatcaacaaccagaatgtgaggagacaataaaagcggtagattctaccaaaggacagattttacaatacgaaggagaagcgattactgcatattatttttctacctcctgcggttacacagcatccgcaaaagaagtctggggaacaagtcaggaagaatatttgcagggtgtggcacagtatgaaggagaaaaggaacgagatttaagcaaggaaaaagcatttaaggattttttgaaggaagatttggaaagttatgataaagacttcccatggtatcgttggaatgtcacaatgagtgtaagtatgttgtcagagtccgtaaatcaagctctttcggaacgttatgagaaaaataaacagtggattttaacaaaacaaaaagatggttcttatgccagcaagccaatctctacgattggagaaataacaggaatttctgtattggagagaggcaaaagtggtgttttaaaatcgattgtgattcaaggaaaaaagggaacagttaaagttatttcggaatataatatacggacactt

SEQ ID NO: 174 - DNA, 762 bp, Unknown
  BMI gene
  misc_feature: SEQ ID N?768969
ggacagcatgcatctaaccttggtggtattcttgctcgtgaaatcggcgatgaattaggagtgccttcatttattgttgaccctgtagtagtagatgagttagctcctgtagcaagattatctggtgttccagaattacctagaacaagtgtatttcatgcattaaatcagaaagcagtagcaaagagatatgcaaaagaaaacggaaagaaatacgaggacttaaatttaatcgttgttcatatgggtggcggtgtttctgttggagcacatgatcatggtaaggttgtagacgtaaacaacgcattagacggtgatggagcattctctccagaaagagctggtggagcaccttcaggagctttgattaagctttgctttagtggaaaatatacagagcaggaagtatataagatgtttgtaggaaatggcggattaaacggataccttcatacaaatgatatgcgtgatgttttaaaagcaatggcagaaggcgatgcagacaacaagatggtatttgatgcctttatttatcaagtatcaaaggatatcggagagatggctactgtattaaaaggaaaagtagaccagattgttgttacaggtggtattgcatattcagatgttgttgtaaacgcattaaaagagcgtacagcatggatttctgactttactgtatatggcggtgaggatgagttattagctttggcacaaggcgctattcgtgtactgagtggtgaagaaaaagctatggaatactaa

SEQ ID NO: 175 - DNA, 909 bp, Anaerofustis stercorihominis
  misc_feature: SEQ ID N?769544
atggatttgggcgttttctgtaaaaaaaatattacaaaacttttactccaacttggtagttgcatgtttttttgtccagtaagattagggtgtcaagcaaatagaacgccaaagcaaaggagaatagatatgaaaagtaatactttagagttaaaaaatattacaaaaaaatatgatggagttacgattttagatgatatttcccttagcataaatcaaggagagattatttctattttaggtccctctggaagcggaaaaacaacattattaaatctaatcttaggacttacaactgtagattcaggaaaaattctttttcatgggaaggatatcacacagacttctatggaaaaaagaggcttcaatatcgtatttcaagattacgcactttttcccaatctaaacgcactacaaaatatcacatacggattgaaaaataaaccagatatttcaaccaagcaagaggtagatgatctcatcgaattacttggtttacaagaacatctaaataaacggattgaccaattatctggaggacaaaagcaacgtgtcgcactggcacgcacaatggtcatgaaaccaaaaattcttttattagatgaaccactaagtgccttagatggtgtcataaaagaatcgattaaagaacgtatcaaaacgattgcaaaggaatccccccttacaaccattatcgtaacacatgacccggaagaggcacttactttatccgacagagtgttgattataaatgaaggaaaaatttctcagtatggaaaaccacaggatattattattcgccctgataaccagtttgtaaaagatttcatattaaatcaattggaaatcaaaaaaaataatatttattccctctttaatcaggaattattgatggcacaaggtttttag

SEQ ID NO: 176 - DNA, 1938 bp, Unknown
  BMI gene
  misc_feature: SEQ ID N?769550
caaaatggtgttgtaacttttgttggaggaggaaaggcaacgatttcagcgtattctatggatatgagttgtgcgggaacttgtaaaatatatgtacatcttcctgcggtttccaatttaaaggtgaaggaatataccaatgatagagttgtgctgaattgggacgaaacgaaaaaagcagatggttattatgtatatcaatggaagcaaagcacagcagaatgggttgtattaaatgatggaaatccagtgacagagacttccttcgaaataggaaatttaacttctaatacagattacaccttttctgtcagggcatataatgcaggatgggaaacaggagagcgcgttgtttatgaaagtcaggataaaaaagtatctgtaaagaccttagcatatacaccggttacgaaaatatggagcagtcatgaaaatgtaggaatcccgttaaatactacagttactttaacttgcacatatagcccgaacactgcaaattataataatttaaaagcgtcttttgcgataaagaataaggcgattgcatctattgaagaaataaaggaagtagaaaaaggaaagtattccgttacgataaaagggcttgcttacggaactactgtgttgacatttgcaatcaatgatgcatggggattaaagaaagaaattccaatcggagtgttggcaaagcagtcacttccagaggagtatatcacggtgacgggttccgcaataaaagcgaccattcattttaaaggatttgataatgaaaaggatttgctacaggaaaaggcgattaccgggtatatgattcgaagaacagaatccattgaatttacagatgtaaaatatataccagcggatggttcaaacgaatatctctgggaggatacggacgtcatgcagggaaaaaaatattcgtatacggtgactccttgcttgaaagcggaggatgcgtatttccttggatatggaaatggataccatggcgttaccattccacagtctgtagaggcagaaaaactttccatggagaaagaaatttatgtaatacctttaggagagaaaaagaaaattcatgcgaaaatagaaccagcagaggcaatgattgatagtttaaattggcgttccgagaatgaaggagttgctactgttatacagttgcagaaggaacaggcggtttcgggaactgattatgctacagtaacaggttgtattactggtgtaacaaaaatatatgcagaattaaaagaaaactctaaattacagacagcagctacggtaatcattacacctggaaaggtaaaaaatgtgaaaaaggcatcagatacggattcggtaagtttgctttggaatgcggtagataatgcagatgggtattatgtatatcgttggaacaagtcagcacgttcctgggagttagttggtgatgtacaagaaaatagttttacggataaaaagctggaaagtagcaagatgtatcaatataaggtttcggcctattatcaatacaatgccagtaagtatgaaggaacggtaagtgaagaggtgattgcaactacagaagccttattggcagacgattttaaggtaaaagcaactggttatgaaggtgtatatgatggtaagctacatcatgcagtacaagttactggtacaaaggaaggagatagtataagctatagcgaagatggaaaagtttgggatcgttatgtgccaacagttaaaaatgtattggatagtaaggtaatttatgtatctattacaagagacgaaaaaagctattatatgagtgttatatgtagggtatctccgaaatctatgaaggatgcacagtttcgactagaacatacacaatataattgggacggaaaagaacatcgtccaaaagtggtgatggatgaaaatattgctccagaagagtaccaggtgacgtat

SEQ ID NO: 177 - DNA, 951 bp, Unknown
  BMI gene
  misc_feature: SEQ ID N?771102
atgaaagaaaaacaaaaaattgcaattattggtgccgctttgaaatatccttatgcagacaatttcaaggatttagatagaatatatgaaacaagatttgattgtattcatgacatttctgaaaaaagaagaaaactaaatggattggatccaaatgaagaatacacacagtttgggtatttggaagagttggatgagtttgattataaattttttaatctttcaaagagtgaagcgatttgtatggatccacaatcaagaattacgttggaacttgcctgtggtgctattgaaagtgctggatattccttaagttctcttagaggaacaaatacagcagtaatcataggaacgggaaaatcatcatatgatcaattgtttaaagatgaaacaggctttgctgctactggaacaatggcagatgcaatagctggaaggattagttactctttggatttacatggagaagcaactgtagtatcaacagcatgttcatcttctatgtatgcaacctacgatgcatgcgtgaaattagcagcaggaatgtgtgatgcagcgattgttggcggggtattgttatattttaatgtattgaaggcagatgcagggaaaagagatgtaagtacaattggacttgcggcgtcagatgggcgttgccatacttttgatgattgtgcagatggaattaatatgtgtgaaggtgctggagtagtctttttaaagaggtatgaggatgctgttagagatcatgataatattctttcagtgatatctggctttggttctaatcatgatggtcaacgttcaaatagttttacagctccgagtgtgactgcacaggcagaactttttgaaaaagtttggcgaaatttctctatcaacccagaaaatattgggtactatgaggcacatggtacaggaacaaaaattggagatccaatcgaaattgca

SEQ ID NO: 178 - DNA, 639 bp, Dorea longicatena
  misc_feature: SEQ ID N?772837
atgaaacagatattgtgctttggcgattcaaatacatatgggttaataccgaaaacaacaaaacgttatgattggggagagcgttggactagcattttgcaggagcgagtaggaaaatatgggtaccgtattgtggaggaaggtttgtgcggaagaacgacagtgtttgaggaccgtaccagagtaggaagaagaggggataagatacttcctgttttattggagtcacacggaccattggataccattgttttaatgcttgggactaacgattgcaaaacttactataatgcttctccagaacagattggggaggggttgcaggttttgttaaagcaaattgcggagtttgcaccagagagcaaggtgttgattatatcccctatttttcttggagaacaggtttggaagacggagtttgatccggagttttcaaaacattcagtgaccgtttcacagaaattaggtgatgtttatgagaagattgcagagcaatgggggcattcttttctacgtgcggctgattatgcagtgtgcagtgaggtggatcaggaacatttgaatcaggaagaacataggaagcttgcggatgccatttttgaaaagctaacgttagaagtgttgcgacgggtgtcttaa

SEQ ID NO: 179 - DNA, 1134 bp, Clostridium phytofermentans
  misc_feature: SEQ ID N?772842
atgttgcaggtaaatattagtgaatttacggatcgattaaatagccattttcataaaaatggaagtggttctcaggagattaagctacaagtggatttccatccagaaagcctgtttcagattgccacaaccgtatacaatcgtgacagaaagaccatgggagatattgctacgttaagtgagggacttcgcagtatctatgcgttgtctatgcttgaaacctatgcggaagatgaaaataccataccttgtattattttgatggaagaccctgagatatttttacatccacagctacaaaaaacagccagtgaggtgctttatcggttatccaaaaagaatcaggtgattttttctacccattcaccaaacatgatttttaatttttcttccaaacagattaagcaggttgtcttggatgaggaatattataccgcgatcaaagaggataacgatattgatgaaattcttgatgatttgggatatactgccaatgatttgatgaatgtaagttttgtgtttattgtggaaggaaagcaggatagtgttcgcttgccgttgcttttggaaaaatattattcagagatatatgacgagcagggagggattcagcgtatttctatcgtaccaacgaatagttgtaccaacatcaagacttatgcaaacttaaaatatatcaataaactgtacttgaaggatcagtttttaatgatacgggacagtgatggaaaaaatccaaagcatctggtaaagcagctttgcagttattatagccaacgctccaaagaggagttggaaggaaatcttccaagggtgacaccgaaaaacgtattggtattaaagtattattcctttgaaaattactttttagacccaaagattatgacccagattggcgttattaagaacgaagattatttttacaatacgctatttaaaaagtataaagattacctctataagattggaagcgtgaagcgtatgataaaagcaaccaacatccgcatcaactccaaagaggatattaaacgaaatatggagacgattaaaatttatgtgcgtggacataatttgtttgatatattttatggcagataccacaatgatgaccaggtggaaatactgaaaaaatat

SEQ ID NO: 180 - DNA, 513 bp, Eubacterium siraeum
  misc_feature: SEQ ID N?775519
tactgctacggcaagatcgaaaaggtgattgttccctctcccgacagagtagctcccgactgccccgtttatacaaagtgcggcggctgttcgctccgtcacataagctatgaggcacagctcagagccaaggagcagtttgtaaaggacgctttcacccgtatcggtgggctgtcgcccgaatttctgcctattatcggcaatgacacgataaacggctaccgcaacaagcttcagctcccgataggcacagacaaggacggtaatcttatcgcaggcttttatgcctttcactcgcacaggatcgttccgtgcgaaaagtgccttttacagcccgatattttctcggaaataaccgccgattttctgaaaacagcgaccgagttggatatacccgcttatgatgaagctacccgaaaaggcatactccgccacctttcatctcagaaaaggacactacagcggcgaaatatgcctgtgcatagtagtgacaaaaaatgttccggaaattaa

SEQ ID NO: 181 - DNA, 810 bp, Eubacterium siraeum
  misc_feature: SEQ ID N?776996
atgacaatgtcaaatatgactgctacacagcatcttgagataataagagaaaagaaccgtccgacggtgaatgactatatacccgctatattcaatcattttaccgagttccacggcgaccgtcattacggtgacgatgcggctataatgtcaggtatagcaacgcttaacagcacacctgttacggtcatagcgcaggtaaagggcagaaacttagaagaaaacaagaagacgaatttttcaatgccgcaccccgagggttacagaaaggcattaagacttgcatatcaggcggagaagttccacagacccgttatatgctttgttgatacacccggcgcattctgcggtgtagaggcggaaaagagaggtcagggtgaggctatagctaagaacattgccgaatttatgacactgaaaacgcctgttatatcggtagtgctcggtgaaggcggcagcggcggcgcgctggcgcttgcggtatgtgatgagcttgcaatgcttgagcacgctttatattcggtgatctcaccgagaggatttgcgtctatcctgtggaaagatccgtcaagagaaaaggaagcggcagacctgatgaagatcaccgcagatgatctgtacaacttcggtgtatgtgacaaaatcatttccgagtcggtgggaggtgctcataccgaccccgctcagacggcggacaacatttcggaatatcttataagcgcggtcgaaaggctgtcaaagcttgatatcccgacacttctcgacaaccgttacaagaagttccgcaaaatcggcgttttctcggagtaa

SEQ ID NO: 182 - DNA, 1551 bp, Unknown
  BMI gene
  misc_feature: SEQ ID N?778526
atgccgaacctcattgaaatacagaaggactcgtatcagtggtttttagacgagggtataaaggaagtattcaaggatatttcttctatcaccgacgctaacggcaagctggtactgagcttcgttgattaccgtatcgacgagaccccgaagtatactatagaagagtgcaaggagcgtgatacaacttacgccgcacccttaagagtaaaggcacagctcagaaacaccgaaacgggtgaagttgttgaaaatgagatatttatgggcgacttccctctgatgactgacagcggcacattcgttatcaacggcgctgaacgtgtcatagtttcacagctcgtacgttctcccggcgtttattatggctttgactacgataagaccggtaaaaagctattcaagtcaactgttatccccaacagaggcgcttggctcgaatacgagatggactcaaacgacatatattatgtccgtatagataagaacagaaagatacccgctacgacatttatccgtgcgcttggtataagcagtgatgacgatcttatcgatctgttcggcgaagatcccagaatagtgcagactattcaggaaaaggacgcaacaaagaataccgaagaggcgcttcttgaagtatacagaaagttaagaccgggcgaacctcccacggttgactcggctaagacgcatcttaataatctgttctttgatgccaagagatatgaccttgcaagattcggtcgttacaagtacaataagaagctcggcgttgcatctagaattgcgggacacaaggcggctcagcctattatagatcctacaacaggtgagatacttgttgatgaaaacgaatttatcaacgctgaaaaggctcagatgatcgagcaggccggtgttatggaatgtgttatcttctcggaagataagacagctaaggttctcggtaacggcatggtagatattgcaggctatattcccgaatctatcgatgctgaggctctcggtatcaatgagaaggtttgtttcaaggtactgcgtgaaatactcgataaatgcggagatgatgtcgaggcacttaaggaagagctttcaaacagagttgaggatcttatccccaagcacataactcttgatgatatatttgctacagtcagctactttatcaacctttgtgaaggtgtcggtgaggttgatgatatcgaccacctcggaaacagacgtatccgcagtgtcggcgagctgttacagaaccagttcagaatcggctttgcgagaatggaaagagttatccgcgagcgtatgggccttcagtcgcaggaaggcgacaaggtgacacctaacgcccttataaatatccgtcctgttgtagcggctatcaaggagttcttcggttcttcgccgctttcacagttcatggatcagaacaatccccctgcagagcttactcacaagagaagactttcagctctcggtcccggcggtctttcgcgtgaccgtgcaagctttgaggttcgagatgttcactactcgcactacggcagaatgtgt

SEQ ID NO: 183 - DNA, 1251 bp, Eubacterium siraeum
  misc_feature: SEQ ID N?783883
atgaagaagagattaacggcaatacttacggtaatggcgcttatgctgacaggctgtgcgggcaatgtcacatcaggcacagacagtcagggtgcacaaagcaatgtatccgatggttcaaacaatggtacagcacctgtaccagatacggacgactcacgctatgagataatcacagcgactgagatggcggaaaaaatgggactcggcataagtcttggcaacactatggaagcgtatgaggctaccgattgcgagaagatgtcttacgaatggatccccgttgtcggcggaaatgagccgcaggactatgaaacctgctggggagcagatgtcacaacgcaggagatcatcgacggaatgaaggcagagggcttcaacactgtgcgtattcctgtgttctggggcaatatgatggagaatgacggtacatatacgataaacaaggaatatcttaagagagttaaggagatcgttgactactgcgaaaaggcaggcgtgtattctgttatcaatatccaccacttcgatgagtttatcataaggcgaaacgaccttgacaagtgcaaggagatattcacgcatctgtggacgcagatagccgaatactttgcggactacccttatacactggttttcgagggatataacgaatatctgggcggcgatcagttcgactcaaacggcaaccttaaggcgcagtccgataccaacgcgtacaagatgacgaatacgctcaatcaggcttttgtagacgcggtgagaggcactggcggatataatgcacagcgcgtgcttgtcatttcggggtactggacgaatatcgacaagacaacttcatcaaggtttgagatgccggaggatctggtaaacgaccgccttatggtgtcggtgcattatgttgacaactctatgtactgggcgaacaagatcggcggagaggaatggctgaagtacatcgacagccagtgcgccgagcttaaaaaggcttttcttgacaacgacatccccgtattcatgggcgaaacgacctctacatatccgcaggagaactttgcaaaggacgcagagtacaccgactcttccgagtgtctgtcgatcgtactcggaaagcttacagatcttggtatagttccggtcatatgggataccaacagccatttctattcgaggacaacatacaagataatgaacagctcggacaggaaggttataagggaatatgcggatacgctgagcgcggctcagcag

SEQ ID NO: 184 - DNA, 288 bp, Unknown
  BMI gene
  misc_feature: SEQ ID N?784098
gacgggatagagaatctgctctccacgcagcaaaaaattctgcaaaacggcgcggattctcttgccgaaaacggccgtttggtgtattctacctgtacggtgaatcatcacgaaaatgaagcccaagtacgccagttcctgcaagacaatcaagatttttccgttatagcgccacaaatcatactgtccggtatgcgggtgggggagtacggcacactgtttctgccgcacgaaacatccacagacggtttttttgccgctattttggagcgccaaaagaactgctga

SEQ ID NO: 185 - DNA, 684 bp, Unknown
  BMI gene
  misc_feature: SEQ ID N?784499
ccggtgatgataggtcttacctatgcgacgcgcagtgagcggccggaacatatccttacctatacgacggggagacttgtctgggataaggatacttcagtgcgccctgacggctcggcggcactttctttttttgagtctttgtatcagaatgtcaatgcagaaaacgttgaaaaggtattggcgcccggtacggaaaaggacagtattgtccgtctgaaaaacaacagcaaaaacagcgtcaggtataccgctgttctttacagtttatctacaacacccgatcttgatatcggcgcgagcctttcgggcgacgggttttcggatacatcggattttactttgcccgataagataaataaagatacggtaattcgtgcggtcggcggttcaattgctgcaaacgcaatgcaggactttgatataaactggttttggtcatttgaagatgctaacgatacggaatcccgtgataagatcgacacatatcttgggaacaaagcagccgatgaagcaacgctcggtttttatcttgttatacacgacggcggcgattacggtccgtcaccgaagaccggagataatacgatgatcggcgggtatgttgttttaatgattatcagcggtagtatgacggtgattttggctgtcacaagaaaacggagtagtcgggatgaaaattaa

SEQ ID NO: 186 - DNA, 324 bp, Eubacterium siraeum
  misc_feature: SEQ ID N?786679
atgaaactgaaaaagtggtttttagctattgcggctttcgcggttatggcggtggtgtgcgccgttggagcgggagcggagtggtacagggattatgagtacgacgagcttgctgacggcagcgtggagattgcgtattactttggcaatacggaaaaaaatgttgatataccggaaaaaatggacggaaagagcgtcacgagcattggctctaacgcttttgggggtcacacaaatcttgtaaatgtaacgataccgaatagtgttaagaatatatgcaatgatgctttcagagattgttcaaatcttacaagtataacgata

SEQ ID NO: 187 - DNA, 3687 bp, Eubacterium siraeum
  misc_feature: SEQ ID N?787080
atgaaaagaacattttcaaccagaatcatagccggcatagcaacatctgccgtgcttgcagtcggctcgctgtcctttatggcaataaacgcaattgccgatgaagcggtgagttattacggactgtctgcagacggtactgttgtaagcggaacggtaactgattatacaaagatagcttcaactgataccgcatggggcattgccggcaaagaaacgtggtatgtggctgacggtaacattggtatcggtacaacaaatcctctggatctcaaaggaaatgtaaatgtcatactcaagaacggtgcagagatatttgtatggaacggtattgccggcgcagatgcaacaataaccttttatagtgaaaccgaaaacggcggcggaataatgacaatcagaggtatagacggtcaggacggtcaggccggcgggactgaaagcatgggcgaaacgggaacgggcaaaagcggcgataacggtagcagtgctgttgattgcggtagcttagttatttccggaggacagatcaatgtgattggtggcagtggcggtaacggcggtaacggcggctattatactgccaacagtttctttggcaacggcggtaatggcggtaacggcggtgcggctataaccgataatacaaaggtgtatcttaatggcggcagacttaacgttacagccggcagaggtggagatgcgggcgtaaatacgtacgcacccgatgcagaacgtgataattataatggcaagccgggaaataacggaacatcggtaagcggaatatatgccgtaaacggtattctcaatgtcaataaactcgatgattccgatgccgccgatacttctggtgattttaagctcctgtctgcgaacggttacgaaaatgcaaagcttgatataatcggtcacggaacggcgaaggtagcggacggcactgttattaaaacctacggcgatatttccgtagcaggcactctgcttgtcgataacggtacgatactcacaaacggcagtattacaaaagacagtacggcacagataaaaaagacgaacggcggcgttatccgcaggttcacacctgcttccggtgccggatatacgctggattatgcaagcggtaagtgcattgcggaaaccggctataaaataaagctgttggacggaaatactttaaccgatgttgccgatgccgacacaatagtatcggaatcaaacagacttagtattgtccacatcggtgacagtgaaataatagatgacagcgagccgcaagtaaatgtaatgccctattgcataaaggcaaataatacgaatgaaacaaccgtaacggacggaaatgtctttgctacgagaggagctccttcaaggtttacgtttgctctgaacgatccggatgaataccgtttctcaggcgttaaggtaacagatattgacggtaatgcgatacctgacaatatgtacacgtttgacagcacgacaggcgagttcatcgcactttcggttgaccgcaaccttatcgtaactacagacgcaagtcttaaagatgttgaaatatctgtaacagacagtgaaaacaatcctgtgtcaactgtcgacttcggtacacattttgataacgacaacccgacaaagacagtaacgctcaaggtgaaagtcacagagggcggttctatagcaaagtacagagtagtaaaggaatccgatcttaataaagcaagcggtgtcataactgacacttcttcgttcacagtatcatacactgccggcaatgaatggggtactgccgatgacggctcttcaaagattgcaaagggtgaaactgcaacattcacagttaagcccgacagcaatttagccgcaggaacttataccgaagattttatcgttataacagacagaaccgcttatgcggatgcgtcggcaggcactcaggataaggctctggcacgtttcacgctgacttataaggttgaacatgagagtgacggcaatctgcattattccgatctaaccggacactataatctttgtaagaactgtcaggcaaaaatcaataaagtaaatcatacatttgacatcagaactgtaaacgaaaacacgttagctgctcctgcggattgtgtaaatcctgccaagtatttctattcgtgcgaatgcggagcgcacacaaatgacatggcgctggtgtttgaaaacggcgatctgaacggtcacacatttggggagtgggaagcagatatccctgccggatgccttacatcaggcagcgataaacgtaagtgttctgtgtgcgaatatgaagaaacacgcgaaatcgagccgacaggtcatatatgggaagacgactttacgattgacattaagcccggttgtaccgaaaagggatcaaagtctgtgcattgctcaaaatgtgatgagaaaaaggacattaccgaggtacccgcaaatggtcattcgttcggtgaatggacaatactcaatatgacagactgtacacagggcggcgtacagcaacatatatgtacagaatgtggctttacggagatctccgacattccgcctcaggaacatgtatgggatgatgactttacggtcgatttagcaccgacttgtacgcagagcggctcaaagtcgatccattgctcaagctgtgaagctgtaaaggatatcactgagatcgagccgatagatcatgtattcacggaatggtcagtaagttctgatgccacctgcgttgaaaaaggacaaaaaacaaggtcgtgcacagaatgcggttacactgaatatgatagtatcgatatcgatttaaatgcacatttatgggaagatgatttcacgatagacaaagaaccgacctgtacggctgacggttcaagatctatccattgctcacggtgcaatgcaactaaagattcagaagctataccggctacagctcatcagtacggcgaatggaaagtagtcaaaaaagctacctgcacagagaacggcaagcgtgtgcgtgaatgtgcaaactgcggaaaaaatgaagaagatatcattccggcggctcatatatgggataaaaagataactgttgataaagaaccgacctgtaccgaagacggttcgcagtcgatacattgcactcagtgcaatgcgcaaaaagatatacagaagctttctgcaaaaggacacgactggtcggaatggaagataacaaagaagccgacaacagttgaaaagggtgtcgaagagcggcattgtcaggtgtgcggagttgttgaaaaaaatgagcttgatcttatcagagataacacttccgatagttccgacagcaagcctgaaaccccggacagcaagcccgaagccccggacaacaagcctgaaaccccgggttcggatatcactgagtggcattgcgatggcagtcaccactggcatattgatttaaacggaaaccgaattgattatgcatatcatgagtttgtatggataacagataccgaaccgacaggcacacagcccggaataggtcactatgtctgcattgcttgtgattataccacatcgcccgaggagtttggcaaggacagtcccgaaacgggtagcgaatcgctcgcactgtggatagcggctgcatttgtcgcaggcggtgttgcaccgatagctcttaaaatcaaaagcaagaagagcaagtaa

SEQ ID NO: 188 - DNA, 1740 bp, Eubacterium siraeum
  misc_feature: SEQ ID N?790377
atgcactgcgtgaaaggaaataaaatgaaccctgaaaagaaatttgaaacaagcagtaaagatgatatcaaagctctttttgaaaacagaacggaagaagatattatcccacccgattcgttcggcaaaagcgaaaagcaggtcgtaacaaaagaagctgtgcaaagcgcagtcagaaagacagcatcagaaagcataaaaaagcggaaacgaaaccgcacaatagcaaatattatgatatacagcggtatcggactgctgatagttgcctgtgccgtattggtagccgttatattcaacggtaacaacggcagcagtataaagagtcttgacattacaaacagcggcgaaataactctgcgcgtcggacactcacagcagataaaggtaaagacagagcctgccgacaccgaatatgccctgtcgtatgtcagcggtgacacatcggtagctactgtatcacttgacggaaaagtcactgccgttaaaaacggaaagacagagatcaccgtaagcagcggcgagctttctgacacaataacggtaaatgtcaaaaaagatataatagaatcgcttgacgtttcgcttgcggcgttatcactcgacggcggcgaagaacagaagatagacgcaaagcttactcccgctgacgcaaaagatgttaagctgagttggaaaagtgcagatacagatgtagctaccgttgataagaacggcgttgtaaaaggggtaaatcccggcgaaacaaccatcactctgaccgattccgtaacgggtctttcaaaagatatcactgtcaccgtgaacggacttgaactccccgaatcgatgaaattcgacaaggacagcgtaactgtcgaggtaggagatgtgtataattcagttcttaagttcactccggaggatattacctacaccggtgccatatactataccagcgactcatcggtagcgtccgtcacaaacgaaggcgttataaccgcaaagagcgccggaaactgcaccatcgaggcgtattacgaaaacgactaccgccttgtggcatctatggaggtgaccgttatagatcctttccctataacaagtcaggaaacaaccgccccggaaactccgtcacctgaaacaacaactcccgataccgagcctgaaaccgacccgccggcttcttcaacgcccgctcccgcacctgaatatagcggctcacacaaaatggaagtgatagacggcatcacatattttgacggtgttatgatagcaaataagacctacaccctacccgcaagctataatccgggcgttcagcccgaggcgatggacgcattctacgatatgcaggcagctgcggcggcagacggcatttcactctggatactttcgagcttccgttcgtacgaggatcaggatgttatctataaccgttatgtggcgcaagacggaagagatgccgcagatacatattcgtcacgcccgggtcattccgatcaccagacaggatatacgttcgaccttaactctctcgaacaggacttccagtacgaccccgcaggacagtggcttgacaaaaactgttataagtatggttttatcattcgctacccgaagggaaaagaaagctccacaggctatatgtatgagccgtggcacgtaagatacataggtgtcgaccttgcaacaaaggtaactcagagcggactttcactggaagaatatttcggaataacatcacagtatcaggattaa

SEQ ID NO: 189 - DNA, 321 bp, Eubacterium siraeum
  misc_feature: SEQ ID N?791889
atggaaaaatttacgaataaagtagcctcaatacttatatcgctttccataattcttacatcatcgtgtgcacagagagtgacagtagttgatgaaaatgcaagtaccgaaaaatttattttcaacgatgatgaaaccgcggtacgtaccacaaaagacgtactcggcaaaatgtcgctgagggaaaaggtaggacagctgtttattgtacgtccggaagctcttgccgaaaacagcaatgccgaaacagcgccggctacagaccgtgttgacgatgccgttatcaaccgtattgaagaataccctgttggcgggataacg

SEQ ID NO: 190 - DNA, 852 bp, Eubacterium siraeum
  misc_feature: SEQ ID N?791890
gagcagttaccgatgttcatctccgacctgcaaagcagcagtaaatatccgctttttatcgccgttgacgaagagggcggaagagttgcccgcattgcaaattctgattttttcaatgtagcaagctataagagtatggaagatataggcaagtcaggcgatgcatcaaaggcggaggaggtcggcaggcagattggcttgtaccttaaagaactcggcttcaaccttgatttcgcgcctgtcgccgatacaaatacaaatccgcagaatatagtgataggcgatcgttcctatggcagtgatccgaccttagtcgcctgtatggtttcggcacagcttgacggaatgcacgacagcggcattatgggaacgcttaagcatttccccggacacggcgacacgaaggatgacactcattcgggatatgtgagcatagaaaaaacgtgggacgagctgaaagagtgtgagcttgttccgtttataacagcgcttccgaaagccgatatggtgatggtatctcacataaccgccgtaaatgtaacaagcgacaagctgccgacctcaatgtcggaaacgatgataaccggaaagctccgcaatgagctcggatatgacggagtgataatcacggacgctatggctatgggtgctgttgccgataactacacatctgccgaggcggcagtaaccgcagtaaaagcgggggttgatatcgttcttatgccgcaaaatctcgatgaagcgttcaacggcgtaatgaatgcggtaacagacggcgaaataagtatggaacgtctggatgaaagcgtaatgcgaatattgaagctgaaagcgagatacaaattgatatga

SEQ ID NO: 191 - DNA, 1578 bp, Eubacterium siraeum
  misc_feature: SEQ ID N?792637
atgtatttaatggatactcctatatttgactgctttgacccgaactataaaagcccgttcggagcgataagacagtatcagcccagcactttttccctgcgtttcccgaaggaatggcatgttaccgaccctaccctggtaatgtttcgtcccggcgaaaaagaacgctttctaccgcttgagataacagacagcaccaccgatgtcaacgtatttacctgcaacttcaaccctctgcatatcggtctgcatcactactacttctcattgatgatcgacggcaacagaagatatgtaaagcgcagcggagcaaggcttggcgttctggacaacggcgagctgttccagcttactgtttttgacaaggatatggcggctcccgactggataaaaggcgggataatgtatcagatattccccgacagattttgccgcagcggtgaaaaacacgaaaacgttccgactgacagaataatccacgagaactgggaggatacgcctttcttccgcccggacgacaaaggcattatccgcaacaacgactactttgcaggcgaccttaagggtatcgaaagcaaactcccctatctcaaaagcttaggtgttacctgcttatatttaaatccgatctttgagtcgcacgaaaatcaccgctactcgaccgcctgctatgagcacatcgatccgatgctcggcagcgatgaggactttgagcacctttgcaaggaagcaaaaacatacggcattgatattatccttgacggtgtattctcgcatacaggtgcagacagtatctatttcaacaagttcggcaggtacggcgagcatgagggtgcatataaaaatcccgacagtcgctacagaaactggtactgcttctcgcgctatcccattgagtacgaatcatggtggggcatcactactctgcctaacgtaaacgagaacaaccctgactacaccgcatatatctgcggtgaaaacggcatattacaacgctggatagacaaaggcgcaaggggttggcgacttgatgttgccgatgagctccccgatgagttcttagacaatctcaataaagcagtcaaagccaagggcgatgataaggtcatctacggcgaggtgtgggaagacgcttcaaacaaggagagctacggtgtccgcagacgttatcttatcggcggtcagcttgacagcgttatgaactatcctttcaaagaggttattataaactattgcaagtacggtgactcaaagggctttgaggacggcataatgactatacttgagcattaccctaagcccagtgccgatatgctgatgaacttcctgtcgacccacgacaccgagcgtatactgacaagacttgcaggcgaggatgtaggctggcacgacagagaatggcaggctgagcgctatctttctccggagcagtatgtatacggtctgtcacttcttaagtgcgctatggtactgcaattcttcctgccgggcgtaccgtgtatctattacggcgatgaagccggtcttgagggatataaggacccgttcaacagacgttgttatccgtggggcaaagaa

SEQ ID NO: 192 - DNA, 2301 bp, Eubacterium siraeum
  misc_feature: SEQ ID N?793094
atgacatccaaaaaagatatttcaaaagaatttgagaaaatttcagagggcgttgaaaaagcacgcaaaaaacgtaaatcactgacaggaaagatattcaagtggatgtgccttgccgtaggcggatcacttcttatagtcggcggaataaatgtagggatgagctataactttcttaagcagtcactgaaagaccagctgacagaggttgccgatatgtctgcaaaaactatatcgaaccagctgagtacgatcactgctgaacttcagcaaatatcatatgactccggttttgaggatctttcggatacaggtacgctttctacaaagtgcttttcgatacttacgaaaaacccgatgctcaccgatatcaagatagtcaatacagacggcaagtgcttttatgccgaaacgcttgattattccgaaaacgaaagcttcaagcaagctgtcgaaaccaaaaaatccgcaagcggcgaaccctatgcggcaaatgacctaaaacacgttctcatggacattgcagtgcctatgtttgaatcggataacagtacactcagaagtgttcttatggcaagcgttgacatgagcacgttctctgcagtgatcggtcagacaaagataggtgaaacaggctatacaatggctgttgatcaaacaggaactattatcgcatatcccgatgaaactaagcttacagagcgaataaactacaagacccttgctcaggcggacagctcgtatcagggcattgccgattgcatcagcaaggctatcagaggtgaaaacggctttgcggaaataaatctggacggtgtcagcaaatacgttacatatgcacctattgagaatactgccggatggagctgtatagtagtagctactccctccgaatataccggaagcatttttcagtcagtagtaatcggctctgtagctgcagtaatctgttttattatttcagtactccttatactcacaatagtcaagaagataatcaagcctgtaaagctctgttctgacagaattgttacgctgtcacagggtgacctgcactctgctccgcttgattttggtgacaagatcgacaaggagataggtcagctcagtgaaagcacaaaccttataacaacgcatataaatgcagtaatatcagatcttgacagtatgctcgccgcactcggaaacggggatcttacatattcacccgccgatgtttaccttggtgactttgctaagctcaaagcttcatatgaacgcataatggcatcgctcaacaagacgatgagcggcataagcatagcaggcttacaggttgctaacggagcgggacaagtatcatctgcagccgctaacctttcagaaggtgcaacaaaacaagctgcttctgtagaagagctctcggcttcgcttgcggaggtatccgaaaaggtaaaccgtaacgcaataagagcgggtgatgccgctaagaactccgaacaagccgccgaactggtcggttcgggtaacaagcaaatgaacattctgcttgaagctatgcacaagatcgatgatacatcaaatcagatcgccaatatcatcagaactatcgatgatatctcattccagacaaatatactcgcgctcaatgcggcagtcgaagcagctagagcaggcgaagccggcaagggctttgctgtagtagccgatgaagtaagaaatcttgcaggcaaggttgcacaggcggcgagtgatacaacagagctcatcagcgattctatcaaggctgtcgaagacggtactgcaatagcaaacgaaaccgcgcagacattgagccttatagtagaaaccaccacgcagactactgcattgatagccgatatttcaacagcctgcgaagaacaggcaaacgctatatcgcagatatcgacaggcgtggatcagatctcatctgtagttcagaccaattctgcaacaagcgaagagtgtgctgcatctgccgaagagctttcatcgcaggcttcaatacttgatggcatggtaagcaagttcaagctcgacaataatgttttaaataataaagttgacgcagaaacgcctgcgcccgacattgcctcagaagcaaaaccgattataacggatctcggcgaaaaagaaaaagctaaggctgatatcggcaagcataacgaaaaaactgcagcaggcattaaaacaaataaagaaccgatccggaaagacaaaacagccgaattatcatcagttcagataaagccggtcgaaagcgaaaagcctgcagtgccggaaaagaaaacaaaaaacgat

SEQ ID NO: 193 - DNA, 417 bp, Eubacterium siraeum
  misc_feature: SEQ ID N?793149
atgacggataatttactgcgtactatggcgataatcaccgaagagtctgccgctcagagcataagcggtatgtgggctacggtcattaccggtatggttgttgttttcctgatcttaggactgcttataggactgctttacatcatttccttcttctgcaatctgggaaacaagaagaaaaaagatgataagcccgctgaaaagactgctgaagccgcacccgctcccgctcctgttgaacttatcgaagaggacgagaacgacgatgaggtcatagctgttatttcggctgctatcgctgcttacacagcaggcgacggcaagacctatgcaatcaagagaatcaaacgtgccgacaaacagcctcgttcaagctggggcaatgcgggcgtaaacgagaatacccgttcgttttaa

SEQ ID NO: 194 - DNA, 210 bp, Eubacterium siraeum
  misc_feature: SEQ ID N?793469
atgctcggaaagatgaaaggctaccgtgcggtttacgccgtagcactgtgtctgtcagtggtgatacagtcgtttttccttacaggacctatgattgttgagcagataataagtatatttatatcttctccggacgctttgcagaatattgaaaatcagcgcgatctgctgatactgctttgcgttgcgatgatattattcgtttttgtt

SEQ ID NO: 195 - DNA, 381 bp, Unknown
  BMI gene
  misc_feature: SEQ ID N?794741
atggaaacagcatatatgatcgaattatcaggcaacacttcacgaaaagaggataacattatggcaacacccgatcttttattcccggcagacgcaaagcaaaaaagatacaatcagcttgctaaaagcgcggcggctgatctgcagatagaatatcttgcgatgacgctttcgccgtatgatacagagtatgcacagcggatattgtcacagcttgtgacagatcccgaagtcataagctacagacaggatatagtcgatgattttataaatgtacctgagcttgaggcaattctttataaaagcctgcatactatttatgcaaactcaaaatcggtctatgcaaaggcgggctctactcagtcgttctctttgagctga

SEQ ID NO: 196 - DNA, 954 bp, Eubacterium siraeum
  misc_feature: SEQ ID N?796765
atgatattattcgtttttgttcgtacctgtctgcaattccttgcaaaaactctttatgagatagtatcacaaggcgttctgcaaaaagtacgaaacgagctttttgagcgtattcaaaatcaggatatgcacttctttgacactcatacaaagggcgatcttgtaacaaggcttacgggcgaccttgatatgatacgtcattctatcgcatggataattatgatggtggttgaaagcggtgcattgttcttattcaccgtgatctacttttttacgattgactggctgatgacgctttgcatacttgcgcttactccgatactctttatagtgactcgtatgtttgcgaaaagagtaggaccgaaatatgtagtgctgcgtgaaaagctctcgcgacttaacacaaaggcgcaggagaatatcgccgcaaaccgcgttgtaaaggcttttgcccgtgaggattacgaaaaagaggactttgacaagtataacaaggattactgcgagcataatcaggaggcggctatggtatggcttacattccagccttacatagaaacactggcgcaggctctctgggctgtgcagatgcttgtcggcggcatatttgttatcaacggaagaattacaattgctcagtacaccgtattctccggacttctgtggactatagcaaatgctatgagaaatatcggtatgctgataaacgatttacagcgtttctttgccagtatttccaagattatcgaggtatattattcacgcccgaatatcgtgaacaatcataacagcgccgaacgtccccgtcttaaaggtgatatcgagtttaagaatgtatcggcaaagttcggtgatattactgtccttcacaatatcgatcttaacataaaacacggtgaaaccattgtaataatgggctctacaggttccggcaaaacaacgcttatgaacatt

SEQ ID NO: 197 - DNA, 825 bp, Eubacterium siraeum
  misc_feature: SEQ ID N?797076
agaaaggattacagcatgactataaagacatactttcttaacgaagaaaagacggtatatttaaaggcgtatatgcttgacaacgttgaaggtctgccgttctgtgaaaaacgtccgggcattctcattcttcccggaggaggatatgaatattgctccgcaagagagggcgaacctgttgctatgcactatcttgccgagggctataacgcttttgtacttatatacagctgcaatgcacgacaccctgccccgcttctcaatgcttcatatgctatcctgaaattaaggcagagatgcgaagagttcggcatagatccgaacaagctcgcggtatggggcgcaagcgcgggtggacaccttgccgcttgtactgctacaatgtggcaagatccttcaatatacaaggcgctcgactgtaagcccgaggatatccgtcccgatgcggcgatactcagctaccctgttatcagcggtacaacaaatccgcacaagggttcgtttgacgtactgctcggcaaggacgcttcaagagatgagctgtcaaagctgtctattgaaaaccgcgtaacgccaaagacaccgccgatattcttatggtgcaccgcaaacgatgactgcgttcccgcacagaacagccttgttatggctaaggcttgcgtatcaaataaagtacccgttgaactgcatatgttcgactgcggtcctcacggactttcgacctgcgacaaggtaacaggctggaacgaggctttctatcttgacaactgcaagcagtggataaagatgtccattgacttccttgcaaagtacctcggagtctga

SEQ ID NO: 198 - DNA, 735 bp, Eubacterium siraeum
  misc_feature: SEQ ID N?797363
caaaaaaagacagggggttataagttgagatttgcaatagcagacgatgacgagcgcgaaataaatacgttcctgtcatatataaataacaatctgagcaatgtcgaagcgcattgcttccacagcggcgaggagtttttagacgcgtgggcaaagagcagatatgacgttgtcatacttgatatattcataggcgaaaagaacggtatggaaattgcgcgtatcataagaaacgatgataaagatgtccgcatagtctttgctactgccagcaacgaatttgccggagaaagctatgaggtcaatgcaagctactatctgcacaagccttacggcgaagatcagataaaaataatgcttgaacggcttaagcttgatgaagtggataaacggcgtacagcaatgctcccggacggtactgcgataattctcagaaatatcgtatatgccgattttgcggcacactgcgtcaatatacattacacaaacagtcctgacgtgaagctcagaaccgctttcagaaatgtcgaagcgacgttgtgcgaatgccccggctttttcagcccgtcaaaaggcatagtgataaatctcaatgaagtgtcggcacaaaagaatgatattttccttatgtctgacgatacccgcattccgataagcagaagaaaggcaaaagaagcggctgacatttacacctcctattgctttgaaaagctcaggaaaggcggtgagtgctga

SEQ ID NO: 199 - DNA, 381 bp, Unknown
  BMI gene
  misc_feature: SEQ ID N?806068
atgcctgtatacttgaactttgttgcggtacaggcagacttactatgtccgatagcgcaggaaggatatgatatcagcggggtagactacactgcttctatgcttgaacaagcgaaagtaaaagctgctggagcaggattagaaatagaatttattgaggctgacatcagaactctcgatttacagaagaaatacgaccttgtctttattcctttcaattcgatccatcatttatatcaaaatgaagatttgtttaaagcattacgtgtggttaaaaatcatctcaaagcaggaggcatatttttgttagattgttttaatcccaatatccaatacattgtagaacatgaaaaagaactcatagaaattgctgaatatacc

SEQ ID NO: 200 - DNA, 1002 bp, Bacteroides intestinalis
  misc_feature: SEQ ID N?806228
aagaaaatgaaagatatattaacccgtctcttcaaccacgaagagcttacttcggcagaaaccaagcaaattctcctgaacatcacccgggaagcttaccccgaagcacagatttccgcattactcactgtatttcagatgcgtagcatcacagtagatgaactaatcggctttcgcgaagcccttatggagactcgtatccctatcgacttcgcgccttatcgacctatcgatatcgtaggtacgggaggtgatggaaagaacacgttcaacatttccacttgtgcctgttttgtggtggccggagccggttacaaagttgccaaacacggcaattatggtgccacttccgtcagtggggcaagcaatgtcatggagcaacacggcatccgcttcaccaatgatcccgacaagttgaaacgcagcatggacgagtgtaacatcgcctacctgcacgcccaacttttcaatccggcaatgaagttcgtcggccctgtgcgcaaggcattgggagtacgtacactgttcaatcttcttggcccgcttgtcaatccctgcaagcctacttaccagttgctcggtgtggccgatcttgcacagatgcgactctacacaaatgttttttacaaactcggcatcgattttgcggtagtcaacagtctcgatagctacgacgaaatctccctcacggacgaattcaaagttatgacgcgcaattacgaacggatttaccgtccgcaagcgctgggtttcaatgccgcacaacccgaagagctcttcggcggagcctgcaaagaggatgccgcccgcatctttgataacatccttaataaccgtgccacacgtgcccaaacacaatgtgtcattgtcaacgccgccttcgccatccaggtgatggaacctgaaaaggaaatcgaagaatgcattgccatcgctcgccaatcgctggagagtggacgggcgctggagacgttgaagaagtttataatgattaatagttga

SEQ ID NO: 201 - DNA, 846 bp, Faecalibacterium prausnitzii
  misc_feature: SEQ ID N?807174
gccatgttcggatatgtgatcccgaatcaggctgcgctttcgccggaagcgcaggcgcggtaccgctcagcctactgtgggctctgccgccgcatcggtgcgctgcacggcctgcgcgggcggctgaccctgagctatgacctgaccttcttggatctgctgctctccagcctgtacgatggcgagaccgcgctgcacaccggcgcagaccactgccccatccaccccatccggaaggtggactggcgttccagcgggccaaccgattactgcgccgacctgagcgttgcgctccactactacaacgcgcaggacaagtggaacgatgaccgcagcctgctggggctggggttcgaggcgctgctcgccgcccccactgcggcagccgccgaacgctggccccggcagtgcagcgccattcgcgcctgtctggaccggctgacgcagtacgaggccgagggcagcgaagacctagacaccgtgtccggctgctttggcgacctgatggcggaattgttcgactacaagcaggaccactggtctccggagctgcgcagcatcggctttcatctgggcaaatacatctacctgctggatgcctacgacgacctcgaccgcgatctgaagaagggagcctacaatccgctgcgcagcctgcaccagctgcccggctacgaagaagagatgcgggagatcttcgagctgctgctcgccaactgtgcccgcagctttgagcgcctgccctgcgtggaggatgtggacctgctgcggaacatcctctactccggcgtctggctcaaatacaactgcaaacatgcaaaaaatcccaccagagccgccgaataa

SEQ ID NO: 202 - DNA, 579 bp, Faecalibacterium prausnitzii
  misc_feature: SEQ ID N?809707
ttccggaatcagcccaaaggccagctcgtgggctggctctacggcctgttcagcaacacgcctggcaactacgtgaagaagcccatgcgggactgcaccggcaaggagatctgcatggagtggctgtatcaccttggtgtgccggaaccggagatcgaagatctggccgaacacagcgccaacacggtgcccgtcatgatgccgtacatcacggccttcttcatgccccgcgcagcaggcgaccggcccgctgtggtgccggagggcgcggtgaacttcgcgtttctggggcagttcgcagagaccccgcgtgacaccatcttcacaaccgaatactccatgcgcaccggcatggaggcggtgtataccctgctggacatcgaccggggcgtaccggaggtctggggcagcacctacgacgtccgcgacctgctggacgcagccgtgcagctgcgggatgggcgcccgctgagcgacctcaagatgctatggatcgagcggttcgcgctcggcaaagtcatcgacagggtgcaggagaccgacctcggccgcctgctgcaagaatataaaatcatctga

SEQ ID NO: 203 - DNA, 261 bp, Unknown
  BMI gene
  misc_feature: SEQ ID N?809761
atggatttcagaacaggaggcggcattgctgtgggaaaaccaaagaaattaagaaagctgataaaagcggcgaaaatgggaaagccctgcgctatgtaccgacttggtatttgctttgaaacaggaactatgactgagaaagacttaacgaaagctgccgaatggatttccgcagcggctgagaccggatatgctccggcacttgattggataaaggattattcttttgacgatgacgccttgattcaggcagaaagctga

SEQ ID NO: 204 - DNA, 1236 bp, Unknown
  BMI gene
  misc_feature: SEQ ID N?809996
gtgccgctgatccccatgtccatcgtggcggtgcagaaattcgccaaaaagctgctggacaaatactggggcgaatacaccaccctcggcgacagctttctggaaaacatccagggcctgaccaccctgaagatctaccaggccgacggctggaagcatgaggagatgaaccggcaggccgagcgcttccggaagatcacgatgaaagtgctgaccatgcagctgaactccgtgaccctcatggacctgatggcctatggcggcgcggggctgggcatcatcagcgcggtggcggcgtttgccaaagggcagatcaccctgacagcggcgctgaccatccttctgctggcggcagatttcttcctgccgctccgcttgctgggcagctacttccacatcgcgatgaacggagcagcctcggcggagaagatcttccgtctgctggcggcggacgagcctgccgacggcacacaggaagcaggggaggataccaccctgaagctggaccatgtgacctttggctacgagaacggccgcaccatcctccacgatgtctcgctgtgcatcccgcagggcagcttcgtctcgctggtgggcgagtccggctgcggcaaaagcaccattgcggccattctatccggtgcccgcaccgggtatacgggcagcgtgacgctgggcggtgtgccggtgcagatgctccgggaagagagccgcctgcgcaccttgacggtcgtgccgcacaatgcggccatcttcaggggaacggtcggttccaacctgcggatggcagcgcccgctgccgatgacgctgcactttgggccgcgctggaagaggtgaaccttgccgcgttctgccgcagccagcaggggctggacaccccgctgcatgagggcggctcaaacctgtccggcggtcagcgccagcgtctggccatggcccgtgcgctgctgcacgactcgcccatctaccgcttcgacgaagccacctccaacgtggacgccgagagtgaaaacgacatcatggcggccatccgcaagctggcggggaagaaaacggtcatcctcatctcccaccgcctggccaatgtggtggacagcgactgcatctacgtcatggacggcggccgcatcgccgagcagggaaaacacgaggccctgctggccgaaggcggtgtctacagccgcctgtacaacgcccagaaacagctggaagaccttggggaggtgagcgcatga

SEQ ID NO: 205 - DNA, 621 bp, Unknown
  BMI gene
  misc_feature: SEQ ID N?833652
atgaaaaaaattctgtttttccgcgtcgtgctcctgtttgcggtggcaacgctcctgcttccatgctttgctgcctgccgcggggacggtaacaaaagcgaaaccacgactccgtcgcagacaaccgcgaccgcagaaccgaccggaaagctgtcggatttcttcggctcggacgcgaagaattatgtggtcatttacccgacaagcgggaaatcgaccgtgattgaagcggcgaaaaccctgacggcggcgctgaactccacgttcggtctgtcgcttcgctgccgcaccgacaacgccgtgaaagcttctgacagtccgcgcgaaattctggtcggagagaccaaccgaagcgagagcaaaacgcttgccgcaacgctggagaatgaaggcgactggggtatcacgtggtcggggacacggcttgccgtttgcggaaatggcaataccgccacaagccgcgcggtcgaccgtctgctttcggattatgttctcgggaaaagcggaacgttgcgcctgcccgaaaaacttgatctgcattggaatttccgcgaaatgagtcgcgcggcgttcactctggcggaaacctaccgcattgttttcccaagcgccaaccaatcg

SEQ ID NO: 206 - DNA, 507 bp, Unknown
  BMI gene
  misc_feature: SEQ ID N?833787
gtgtttgggttgaaaaaagtgcaaaaatatggtatactgataacgattgcgggcggaaacgaggggaagagtcagatgaagaaagtggagatttacaccgacggtgcgtgcagcggaaaccccggaccggggggatggggcgcgattctggtctggaacgggcacgagaaggagctgtcggggggcgaggcggagacgacgaacaaccgcatggagctgacggcggtcatcgaggcgcttgcggctttgcgcgagccttgcgaggtggttctgacctcggattcgaagtatgtgattgacgcgctgacgctcggttgggcggaaggatggcgcgcgcgggggtggcggaaggcggacaggtctcaggctttgaatgcggatttatgggagcggcttctttctctggtttcgcggcatcggatgacctacgtttgggtaaagggtcacgcggggcatccctacaacgagcgttgcgaccgtctggctgtggcgtttacgaagaaatag

SEQ ID NO: 207 - DNA, 930 bp, Unknown
  BMI gene
  misc_feature: SEQ ID N?833925
caggataagaccggtggtgacctgaaccacttcttcgatgtagtgaaatcttacaatgccgcattggaagcacgcccggaaatcaactcggcaaagacgaccttcaatccgagcttcccacaatatatgctggacattgacgctgctgcctgtaagaaggcaggtatcagtccgagcgacatcctcagcactatgcaggggtacttcggcggtctgtatgcttctaacttcaaccgtttcggtaagatgtaccgtgtaatggttcaggcagaaccggaagcaaccaagaatctggagtcattgtccagcatcaaggtgcgcaacggcgatgaaatggccccgataactcagttcgtttccatcaagaaggtatacggacccgatattatcagccgcttcaacttgtatacttctatgaaagtaatggttgccccagcttccggatatacttccggtcaggcactggcggctatcgctgaggttgccaaagagaacctacctgccggtttcgcttacgaattgggaggtatggcacgtgaagaggccgaaaccagtggtagcaccacaggattgatcttcgttctctgcttcgtattcgtttacctgttgctgagtgcacaatatgaaagttacatcttgccgcttgccgtactgttgtctattccgtttggtctgttgggtagcttcctgttcgtcaacggtatgagcgccatcggtaatatctccattctgaaaatgataatggggtccatgtccaacgacatttatatgcagattgcattgatcatgttgatgggtctgttggcgaaaaatgcaattctgattgtagagttcgccctcgatcgtcgtaagatgggcatgagtatcacgtgggcagccgtattaggtgccggtgcccgtctccgtcctatcttaatgacatcattggcg

SEQ ID NO: 208 - DNA, 993 bp, Clostridium phytofermentans
  misc_feature: SEQ ID N?834204
atgaaggttgcattttacgataccaagccctacgaccgcgcatcgtttgagccgctcggcgaggcgaatcagatccgtttcaaatttttcgaggacaagctgaccgaggacaccgcgccgctcgcgcgcgggtgcgacgcggtctgcgtgttcgtcaacgacaacgtaaacgcggcggtcattgacctgctctgcgacatgggcatccgcgttctgctcctgcgttgcgcgggcttcaacaatgtggatctgcggcacgcaagcgggaaactgacggttctgcgcgttcccgcctactcgccctatgcgattgcggaacacgccatggcgctgcttctgacctccatccgccgcattcacaaagcctatatccgcacgcgcgacttcaatttcagtctgaccaacatggtcggtttcgatctgcacggcaagacggtcggcgtggtgggaacaggcaaaatcgggcgttgcttcatcaacatctgccgcgggttcgggatgaaggtcctctgctacgaccccttccctgccgacgattcctcgctctcctatgtgccgcttgacaggctgttccgcgagagcgacatcatctccttccactgcccgctcacgccggagacgcaccatgtggtaaacgcggagagtcttgcgacaatgaaaaaaggcgtggtgctgatcaacacctcgcgcggcgcgctgattgattccgaggctctgctcgcgggcatcaagtcccgcaaggtgggggctgcttgtctggacgtttacgaagaggaatccgacattttctttgaggacaactcggggcacattctcgaggacgacacactggcgcggctgatctccatgccgaacgtgattgtcacctcgcatcaggcgtttctgaccgaggaagcgcttgcaaacattgccgacacgacggtgcggaatctgctcgactttgccgagggaaaacccggcgcgaacgaggtctgctaccgttgcgcaaaataa

SEQ ID NO: 209 - DNA, 669 bp, Faecalibacterium prausnitzii
  misc_feature: SEQ ID N?834225
aaggaagtgtgttccatgcgaaactggttttcccgccatcccatctggttcatggcgttctatcttgtgttttatctctcggtgttccactggctcgaagtcaacatcaccgtgccggaagtctgggtccactgccatctggatgacctcatccccttctgcaagtatgccgtcatcccctatctggcgtggttcatctggattccgttcaccctgttctatctgctgtggaaggccccgcgcgcggacttctggcggctctgcctgccgctctttgcgggcatgaccatcgcgctggcggtctatgtcatccttcccaacgggctggacctccgcccctaccgcgtctacggttcggacatcttcgcccggatcgtccgtcagctctactccaccgacactgccaccaatgtctgcccgtccatccatgtcttcaactcggtcactctgatgatggcctactaccgcagccgcatctttgaagagccccgccgccgctggatgcgcccggcgtctgcggtgctgtgcctgtccatcatcgcctccaccgtgctgctcaaacagcacagctgcattgatgtggtcatgggcatcctgctggccatggcagtggacagcgccgcctcctcgctggagcggagcgagtaccgcattttgcagaatccctga

SEQ ID NO: 210 - DNA, 783 bp, Unknown
  BMI gene
  misc_feature: SEQ ID N?834606
caccgtctgctcgccagggaacgcgcaggtctgctcgattaccccatgatggacgtcaacgacgccgactgcaagcacctctttgataaccgctacggcacggggcagtccacgctggacggtatcatgaacgcaacgaacctcatcatcgcaggcaaaaccgtcgtggttgcaggctacggatggtgcggcaaaggcttcgccatgcgtgcaaagggcatgggcgcagtggtcgtcgttaccgaaatcgaccccatcaaggcgctggaagcaaccatggacggctttaccgtcctgcccatgcgggaagcggcaaaggtcggtgacctcttcgtcaccctcacaggctgccgcgatgtcctcacgcgggaacatttcgaggtcatgaaggacggtgcattgctcgcaaacagcggccatttcgacgtggaaatcaacaaagaggatcttgcagcgctcgcaaccgagatccgggagcgcaagccgaatatccgcggctaccgcatggcggacggcagaatgctcaacctccttgcagacggcagactggtcaaccttgccgcaggaaatggacatcccgccgaaattatggatatgtcgttcggaattcaggcaaaaagccttgaataccttgccaaaacgcgtggaacgctcgaaaacaaggtctatgcagtgcctgcagagatcgacaaagccgttgcaaccatcaaactggcggcggaatccgtacagattgacgttctgacccccgagcagaccgcgtacctgaatcaaatagaataa

SEQ ID NO: 211 - DNA, 624 bp, Unknown
  BMI gene
  misc_feature: SEQ ID N?834613
atgcttctgtttcaatctgcggcgtttgccgcaacgctctgggaaaggctggtgagttggtatcaccggtcggcattccgcgagctgattacctacctcgacgatcggtatttttcggttgacctcggagtttatcaacatttttcagtttcagctcaaacgggttctgttgtcaggaatctgattctcggcttggcgctcggtctgatccttgccgcagggatttcctgctatctcaaaaccgttcacggcggctttgtccgtcggcttctggcggaggggtgcacaacccccgagacagcaaagtccctttatgagcttggatatttccacaatatttcaataaggaatcagcttcgctccggcgggacaatcggcgcgctggttcatcgcgttggtgccgtaggggaaccggcgtccgacgcgacgaatctctccgccgcaagattttacattcccgaggatctgcgctaccgcgcggaattccgctatgaaaagaaaggctcgggcgcgccgatgatgattctgaccgttgtgctgacggtggttgccgccgcgctcctgtgccgcttcctgccgcagcttctcgggcttgccgacgtgattctcgggatctttcggtaa

SEQ ID NO: 212 - DNA, 957 bp, Unknown
  BMI gene
  misc_feature: SEQ ID N?834703
gtgagcggcatgaattgtacacatgatattcacacgcacacgctgttttcctcctgctgtacagaccctgcggctaccgtggaggcgtatgtcaggcgggcggcggaattgggacaccgcatattcggtatttccgaccatctgtgggacgaaaccgttccgggtgccagcgcatggtatgcagggcagtctgttccgtatgttctggaggcaaagaactgcattccgaaggatacgggcggcgtgaaagtgctgttcggcgcggaaacggaatactgcggcatgagcgatacgctcggcatcaccgcagagagcgcaaagcacttcgactacatccttgttccgcatacccatacgcacatgaagaacttcaccatggcagagccgcccgagattgcggcataccgcaggcagattgccgaccggttgcgggcaacctttgattttctgagcgatcggcagatcgggaaaatggcagccgcgctgaaccacaatgagctctatccgctgattgcggataccttcgattttgtcggttatgcggcggacttcgccgtcgacagctttgagcggatgctgaacaacgcggaattcgtgaagctgacgcagaccgttccggttatcatcgcccacccgttcgctccgttggaaggggagctgtcggtggagatccgccgacggatcgatcttgaccgcgtgcacgcgcttcgcgcaaaggcggcggggatgggagtcggctttgacatcaacctctgcttttattcggcttccggggacggctaccgcaacgatccgatggttgcgatcatgcgggcggcaagggaggaaggaatccgctttaccttgggaacagacgcgcattccctcgcggcgctggacaccatccgccgtgccgaaccgatctgcgaagccatcggcatgacggatcacgactgggcggagatcgtcaggggctga

SEQ ID NO: 213 - DNA, 762 bp, Faecalibacterium prausnitzii
  misc_feature: SEQ ID N?834818
gtgccgcaggtgcccggtgagcgggatgcggagaacctgcgcgtcgctctgatgagctatgacgaccgggaactccgcatccggaagttttatctggaagagcagagcaccattatccgatgcacctgcttccagagcggggagccggtcctgcaggcgctgcggcaggagcggtgctttgatgtgctggtgctgagcagccagctggaggatatggacagcctgaccttcctcgaaaagctcaaccgcctgcccagccacccgccgctcctgttgcagggcgacggctggaccgacgacatcaccgccgcccacctgcagccgggcagccgcttttacggcgtcgggcacgaccatctgcgggatcttctgcgggggctgctgggcgtccccggccggaactcgatgcagatcgagcggttctgcacccacctgtacgagctgtggaagcttccgcagccggacaccaattgcgaatacctcacgctggcggtacagatcgcctgttcagccgatggaaaactggcgcttcgcaaagagattttgcagggcgtcgcggaacaatatcacatcacggtggccgctgtggacagcggcctgcgccgtctggtcgaagggctggagacacggcacccggtggaatgggagcacttcaaggcggaaaacggcctgaccgggctcaaagtcaccaccggcaggctggtctactcgctgcagcagaccgtgctgcggcgcggcatcatcgtgcgggaacagcggtaa

SEQ ID NO: 214 - DNA, 384 bp, Unknown
  BMI gene
  misc_feature: SEQ ID N?835107
atgtattatactaaaagggagaatgaaaaagcaaaaggcggttacgatatgaacagcgcgttgattgggaagcgaatccgtaccatcagagaagaaaaaggatggaaacaggaggtctttgccgaaaaagttgggcttagcccgacctatatcgggatgattgagcgcggagaaaagattccgaaattggagacctttgtccgcattgcgaacgtgttgaatgtatcagccgatctgttgcttgcggatgtcctgcaagcggagctgttcgcagacacctccgcgcgagccgccgcaatcaacgcgctcgaccccgcaggtcgggaacgcatttatgatgtgatagacaccctgctccgacatgagaaaaaagcaaaggaataa

SEQ ID NO: 215 - DNA, 894 bp, Unknown
  BMI gene
  misc_feature: SEQ ID N?835438
gtgataagcgttaagaatctttacaaggacttcggaagcctgcacatcctcaaggcggtttcctgcgaagtgaaaaagggtgaaaaggtggtgctgatcggcccttccggaagcggaaaaagcaccctgctccgctgtatcaaccagttggaaacgccgacctttggcgaaatctggatggacggcaagctgttgactgctcccgacccctacctgcattttgatgtgattcgtctctccaaaacctaccttgacctgacggcggcgggagtggatgacgcggcggcaatccaacgcatcaaggcggaggatctgctgaaaaagaaggaaggcgctccctatcacgccgcgatgaagcaaattgaaaccgaaaaccggattgacattgacgccgcgcggcagaagatgggcatggtgtttcaacacttcaacctgttcagcaacatgacgattctgcaaaacctgacctttgcgcccgtacagctgaagctgaaaaccaaagccgaagccgaggaacgcgcacgggaactgctcgcgcggatcggtctttccgacaaagccgacgtctaccccgcaacgctctcgggcggacagaaacagcgggttgccatcatccgcgcgcttgccatggagccggaggtcatgctcttcgacgagccgacctcggcgcttgaccccgaaatggtgggcgaggtattggacctcatcaaaaacctcgcgcacgacggcatgacaatggtcatcgtaacccacgaaatgggcttcgcccgcgaagtggctgaccgcgtgctctttatggacagcggaaaaatcgccgaggacggcacgcctgccgacgtcttcgatcaccccaagctcccccgcacgcaggagttcctgagcaaggttctgtaa

SEQ ID NO: 216 - DNA, 951 bp, Clostridium methylpentosum
  misc_feature: SEQ ID N?835458
attcaggatatcctgcccctgctcgagcagatcgtgcagtccggcaagaagctgctgatcattgccgaggatgtggaaggcgaagcgctgaccacgctggtgctgaacaaactgcgtggcgtgttcaactgcgttgcggtcaaagcgccgggctttggcgacagacggaaggaaatgctgcaggatatcgccatcctgaccggcggtcaggtgatctcctccgaggttggtctggagctgaaggacaccaccatcgatatgttgggtcatgcacgtcagatcaaggtcaacaaggagcacacgatcattgtcggcggcgcaggcaacagcgacgacatcaaggcgcgcgttgcgcagatccgtgcggcgattgagacgacgacctccgatttcgaccgcgagaagctgcaggagagacttgcaaagcttgcgggcggcgttgcggtgatcaaggttggcgcggcgaccgaggcagagatgaaggagaagaaactccgtatcgaggacgcgctcaacgcgaccaaggcggctgttgaggaaggcattgtggcaggcggcggaacggcttacctgaacgtcattcccgaggttgcaaaactggttgacacggttgagggcgacgaaaagacgggcgttcggatcgtagtcaaggcgcttgaagagccggttcgtcagatcgcggcaaacgcgggctttgacggcggcgttgtggttgacaagatcatgaacagcggcaagatcggctacggcttcgacgcttacaacgaagtttactgcgacatggttgcaaacggcattgtagacccgaccaaggtcacgcgttgcgcgctccagaacgcggcttcgattgcctctgttgttctgacaaccgaggcggttgttgccaaccagaaagagcctgaagctgctcccgctgctcccgcagccggcggcatgggcggtatgtactaa

SEQ ID NO: 217 - DNA, 426 bp, Clostridium leptum
  misc_feature: SEQ ID N?836015
atggctatcaaaatgagagtgctttgcggatcgggaaagaaaaaagtcctgaacctcgcaaacgagatcaaggatcactattcgctggcgttcaacgcagttgacgtgattccgcccgcatatccctgcgataaggagcgcatcgtcctgttggcaatctccgccaagaaggacatcaacgacacggttcgcctgttctgcaaggagctgaccaaggcacgcgcgcagaatgttgccctgatgattgacggtgacgaagcggttgcaaccaagctcaaggacatcctgaacgaggcaggcacgaacgttgcggacgaagttctttacatcgacggcggcttcccgatcttcggaacgaaactcaaggacgaggaaaagaccgctgccttcgcatgggtcgaccgtgtgatggagaatctgaaataa

SEQ ID NO: 218 - DNA, 1044 bp, Clostridium hiranonis
  misc_feature: SEQ ID N?836097
ctggacgagatcgaaattcttcacgatgtggaagcaacgggactgcgcgtggcggaattgaagcagaaactggcggcaaccgaatcctgcgcggttctggagggatggttccccgagaacatggcggatgcggtcacggcggttctcggcaaattcgagtgcgcctacgaaacggacgagccggaggcgggagaaaatccgccggttctgctccgtaacaacaggtttgcgcagaacttcgaatgggtcatcggaatgtattcctacccgaaatacggcgcgttcgacccgaccttcataatgtcgatcttctactttgtgatcttcggtatgatgttcgcggatgtcggctacggtctgcttctgaccctcggctgtatcgcggggatcaagctgctcaaccccaagcccggaatgcggcgaatgctttccatgttcgcatggtgcggcgtgtcctgcacaatcctcggcgtggtgttcggcggttggttcggagacctgccggttgccattatgaagaatttcatgggtatcgagaatcccgaaagcacgaagatcggtcactttttcgcaaacggtctgttgtttaaccccgtgtcgtcggcagtgtcgttcctgatcctgtcgttggcagtcggtgaagttcatctggtcgcgggtatggcggtcaatatggtggaaacgtggaagagcggtcaccgcgcggaggcaatctgcgggacgggtccgttctgggtgctgtttgcgggaatcgatctcgcagcgccgaatatgttcatcgggatgaagatgatgggcgagggcatgagcgacgcgaccaaagcgatgttcgcctcccttgccggcgttgcaacctatctcatgatcggcggcgtggtcggaattctgcttctcaagggcgttggacagaaatccttcggcggttggcttgtcaaaggattgggcggtctttattcgctcatcagctttgcatccgacctcatgtcctactcccgtatccttgcgctcggtctggtggcgggcgttatcggacaggttatcaat

SEQ ID NO: 219 - DNA, 519 bp, Eubacterium ventriosum
  misc_feature: SEQ ID N?836212
atgaaaaagattcttgtttgtatgatggttctggcgctctgcctctgcgcaacgatttcgtcgttcgcagcgggacaatccgagggtgaatataccggtcagaaggaaaatcagaatgtcaatgttacaatctcgggtgctattgttcatacctatctggttgacattgagtttgccaatccgactttcacttattctaccggttcggtctggaatccggagaagtatcagtacgagccgagcaccgaggctacgtggaatggtaaaggcgaagtgaaaatcgtcaaccactctgacctgcctgttacttacaaggtagaagccacggatgttgtggacacctacggcacgctgaccattcccgtgacgaacggggacggcacgattgcaaagtgcaatgtcggcgatgctcgcggcagccacaacgcaaccgcgacctacacggtcagcggaactcccacggtttcggaaatcaccgcgcagaagctcggttcgattctcgttaccatcacaaagtaa

SEQ ID NO: 220 - DNA, 1113 bp, Faecalibacterium prausnitzii
  misc_feature: SEQ ID N?836262
atggaaacaagctacttaaaaacacttgagcttgataagatcattgcccgcgcagccgagggctgtgtctgccgggaggccaaagcgcagatgctggcgctggagccccagtgcgacccggacgaggtccgctattcgctggaacagacggacgccatcaacagcctgctcatcaaaaacggttcgccccggttcggcggtgtggagggtgtcagccagctggtgacccgcgctgtcaagggcggtgtcctctcgatgggagaactgctgatggtggcgggcgcactccgcaacttccagaatctgagcagctggtacggttcctcggatcacgaggcgctgccgacagacgacctgttctacgcgctggccccgcagcccggcctggagcagcagatctccagcgccattctggcaccggatgccatggctgacacggcttcccgcacgttgaatgagctgcgcaagaagatccacgccaccgaaaacagcatccgcgaccgtctggaaactatggtccgcaacatggacacctccaaatatctgcaagagagcgtcgtttccatgcgaaacggccggtatgtcgtcccggtcaagagtgaataccgcggtgaagtgagcggcatcatccacgatgtctcctccacgggcgcaacggtctttgtggagccgcaggccgtcgtggaggcaaatgcccgcatcctgcaataccgcgctcaggaggcgcaggagatcgagcgcattctggttgcctttacggcacaggtcgccgccattgagccgcaattccagtacagctataaggccatgctggaaattgacgtcctgctggccaaagcgcggatggcgctggacatgaaggccttcaagcctgccgtgcggaccgattcgtccttctcactcatccgggcacgtcatccgctcatcgaccccaaaaagtgcgtcccggtggatatcgcgctgggcagagactacgattcgctcatcattaccggcccgaacaccggtggcaagacggtcaccctgaaaacggccggtctgctgtgtgccatggcacaatgcggcttcctcattcctgccgacgagcgcagcgagatctgcgtgtttgacgag

SEQ ID NO: 221 - DNA, 201 bp, Unknown
  BMI gene
  misc_feature: SEQ ID N?836651
atgacgaacaccgtttttgtggtcgggcttggccccggcggcccgcagtttctgaccgcacaggcgcagagcgccttaacgcaagccgaggtgctgtgcggctatacggtctatctggaccttgtgcgcccctatttcccggaaaaagaatattattccaccggtatgacccaggagatcgaccgctgccgctgggcgctg

SEQ ID NO: 222 - DNA, 1908 bp, Alistipes putredinis
  misc_feature: SEQ ID N?836682
atgctcatcggttccacctacgcgtggttcaccgacaccgcaacgactgcggtgaacaagattcaggcaggcacgcttgacgtggcgcttgaaatgtcgactgacaacggggctacatggaaaaatgcagagggcaagactctgaactttatgactgcggacaaccgcgcggaaatcctttgggagcccggttgtacatatgcgcttccgcttctgcgtgtggtcaacaagggcaacctttcgctcaagtatgagatcgtgatcaccggtattgacggggacgcagagctgaacaaggcgattgagtggacgattcccgccgaaaagacaggtaaccttgcggcaggcgcgacctccgatgccattgcgatttcgggtcacatgaaggagactgcgggcaacgagtatcaggggaagagcattgacggcattgcaatcacggtttacgcaacgcagtacacgggcgagagtgacagcaacggtaatgactatgataaggatgcaactttttaccctgtaattgatgcggcaggtcttaagaacgcgcttgcaaatggtggtaacattaccattgacagagacgttgcgtttgctcctgttatcgctgacaaaactcagcagacacttgttgcacagacaacaatcaccaaagatacgttaatcaatcttgcaggtaagaagatcagtgttcagcacgatgaaacgactgactttggaaaggcttcgccggttctcatggctgttacagatggagttctgacaatagatggaggcggtgagatcaactgtgaggctggcagccaacaggtttacggtataaatgtaaatggcggtaaggttatagtcaacagtggcaactattatggggctataactgcaattcaggttcaaaaaggtagccttgaaatcaacggtggtttctttgatatggctcctacctgcaaagccgcggttcctcagtatgcaaaatatgtggtcaattgtattgacgccgcatataaaaacggaactgctattatctccatcaaaggcggaacatttgtaaactttaatccgtctgctaaccctgaaggcgaaggaacttcctatgttgcggaaggctattccgtagtttctgaaacacaggaaaacggtgatatttggtattcggttgttaagggaactggtgtggttgccggaactcaagaagatatgaacaaaggaattaccgactctgcaagtaaggatgtcaccgttgtgatgcctaagaattccaaagttacgcttgacaatggtcttgcaaatgagggcacaaagagccgcgatatcacctttgttggcgatggcacacagacagttgatgtggcttctaaggctacttccgctgaaggcgcaaagcacttgaactatcagcgtggctcgacccttacttttgagaacctgataattgaaaatggtaccgatacttatgatggtatcgtttgcgatgagctgatttataagaactgcacgattaaaggtgtaaccacattgtatggcaaggctacgttcattaactgcgtctttgagaatgatatggcaaaccagtactccatttggacgtggggcggcacggatgtgacgtttgagggatgcacgttcaatacgaacggcaaggcgattctcctgtacggtcaggctacggaagcaaagccgacaaaccttgttgtgaagaattgcacgttcaacgaccgcaagaacggcgcggcaggcaaagcagctattgaaatcggcaacgattacaatgcaacttacacgctgacggttgaaaatacaactgtaaacggttttgcagacggcaaaaatactggctctaaactgtgggcaaataagaacagcatggatgcggcacacctgactgtgacgattgacggtacaaaagttcaataa

SEQ ID NO: 223 - DNA, 660 bp, Clostridium leptum
  misc_feature: SEQ ID N?836735
atggagaaaaacgaaacgtctcgggttatcatggtgcggcacggggaaagcctcggcaatgcggagggcttttttgcgggacagaccgacattccgctgaccccgctcggacaacgtcaggcggagcggacggcggaatacctgcgcgacagaaaaatcgaccgcatctattccagcgacctgatccgctcaatgcagaccgccgcgccgaccgcgcggatgcacggactggagatcattcccgaggcgggtctgcgcgagatttttgcgggcaaatgggagcatatgccttatgcggagattttcgaacgttacccgaacagccgcggaatatggaaagagcacgtcgggcttgcctgccccgacggcggggagtcggtcgcccacgttgcagatcgcgttaaagagacggtggagcgcttggtttcggagaacccgggcaagtgcatcgcgctcttcacgcacgcattgccgattcgttcgatggggtgcttctggcagggtatcccgattgcggaaatggagcggcttccgtggtcgaccaacgcggcggtgagcgaggcggagtacttttcggacgatcgggtcacgatgctttgctacggctacaacgcgcatcaggcggggttggaaacaggcttcccgaagggcgcggtttaa

SEQ ID NO: 224 - DNA, 501 bp, Eubacterium siraeum
  misc_feature: SEQ ID N?836767
ctgcatgaatgcggcattccgcataccgtcatgatgacgggcgataaccgcgcaaccgcggcggctgtggcggcgcaggtcggcgtggacgagttccgcgcggaggttctgccgcaggataaggcggagtatatccgccgtgcgcgcgccgaggggcatacggtgattatgatcggcgacggcgtgaacgattcgcccgcgctctccgaggcggatgtcggcattgcaatcaacacgggtgcggcaatcgcgcgggaaatcgccgatattacagtctcttccgagagcctgtgggagcttgtgaccctgcggcggctgtcaacggcgctgatggcgaggattcatcggaactatcgcaccattgtcgggttcaacctcggtctgattctcttcggcgtggcgggtatcctgccgccgaccacctcggcactgttgcataatgcgtcaacgcttctcatcagcctgcggagcatgaccgatttgctcggggatgggcagtga

SEQ ID NO: 225 - DNA, 261 bp, Roseburia inulinivorans
  misc_feature: SEQ ID N?837316
ggactgatcagcttcctgacagcaggagaggatgagtgtcgtgcatggacgatcaaggcaggtacgaaggctcctcaggcagcaggtaagatccatacggattttgaacgtggatttattcgtgcagaggtagtaaactacaaggatcttctggagaatggttcccttgcagcagccagagaaaagggcgttgtaggacttgaaggtaaggactacgtcgtaaaagacggagatgttattctgttcagatttaacgtataa

SEQ ID NO: 226 - DNA, 2064 bp, Unknown
  BMI gene
  misc_feature: SEQ ID N?837359
gaaagccccgaggaagcggcgaagaacgaccgcgaggacgacgaggactttgtggacgacgcggacgattccgaccgtttcagcggaaacgagcggatcatcggctacaacgaggaaacgggttgctatatcgttgcgcactatcgcaagagctttgagggcagactgatccagtcgcgcccgaacgtcaagcattactacagcgaactcaagaatgcgcttctttcctacaagggaacgaaatcgcgcgtcagctggaatgcggacagctttacgaacgggaagaatcccattgcaaaaatcaacatccgcagcaacagtctggagctgtatctggcgcttgatcctgcaagtctggaggacagcatttatcacgggcgggatgtcggacaccagaaacggtatgccgatacgccgttcaaatataaggtgcgttccgatcggaagttcggttgggcgctggaactggttcagcgcgtgtccgaggaacagggactgtccccgattgatatcgaaaagatcgactacgaggaagcctacccgtttgaggaaaccgaagaactggtgcggcgcggcgtaatccgcgagtatatccgcgaggaaaagcctgccacgtcgtttgaactggcggaggatcacgtgtcgcagacgcccgatgtggacgaaagcgttgtcccgccgagcgcgaatgtattctgggaactggacaacgacgcgccgaagcccgaaccggaatccgaacccgaaccgactcccgagcctgaacctgagcctgaaccgactcccgagccggaggaagctgacggaacgtccggggcggagaccgaatctgcgcctgcgccgcaggtcacgcagaccgtgaccaaagagaccgtccgcaccacgcagatccgctacaccgagcaggtgttcggcgacggcatgaacgctgcggttgcaatgccgcccgtgacctataccgaatatctcgaggaagagccgaccgaaacggctgcggaagaaccgaccgaatcgaccgaatcgaccgaacctgttgagcaggagactgccgagccgaccgacacggagaaatttaccgaagccgaggataccgaggataccgaggacatcggatatcccgaggacgaaacggaaacaggggaaggggaacccggagaaacggcggaaaccgaaagcaacacggggcttgtggacgaattcgacaacagcacccgcgaggatgatctggattggggcattcccgaaggaatcgaagcggatttccgcaacgataccggggacggagaggcagccgcagaacccgttgcggaacaggatgaactccccgaagagccgttgcaggaagaagccgaagagaccgaagcgaccgaagaacccgacggggaagaatccgaggcggacgagccttatgacgagacaaccggggcggaagcactgcccgcaatggcggattcggaatcggatgacggcgcatatgaggaacaatattccgatgacggtcagtataccgatgagagtcagtataccgatgacggacagtacgaggaacagtatgcagacgacggtcaatacgcggatgacggacagtatgacgaacagcatgcggatgacggtcagtataccgatgacagtcagtataccgatgacggacagtacgaggaacagtatgcagacgacggtcaatacgcggatgacggacagtatgacgaacagtatgcggatgacggacagtatgcggatgacgggcagtatgcggagcagtacgccgatgacgggcaatatgcggacgagacggcagagcgcatgagcgcagtgcagatcgatcccacggtggcgctgatcgacctgaaccgcattgaggcgttctatgacccgaacgaggtggtcaatctggagtcgctcaaggagcgcggaattgtgatggacagcgcgcggacgctcaaggttcacacctcgggagagctgcacattccgctgaccgttgaagcgcagaacttttcacgtgaagccattatcgcgatcaacgacgcgggcggcgaaattctgaaggtaagggaggggtaa

SEQ ID NO: 227 - DNA, 798 bp, Faecalibacterium prausnitzii
  misc_feature: SEQ ID N?837728
gagggcacggtcttcttccgggagctgcccgacgccctgctcaagccgctccacgccttgcaggcccctttgcaggactggctggagcaaaaccccgatgccgacgcccacgcccggctgctggagctttattttgctgtgcaggacatcacccgcgcagccgaccggtacgacacccacttcgtcacccagctcacggcccgcggcagcgagctggagctggaactgctctgcctcgacccctccgcctttgtggacgcgagccttggctgcgggcgggcggcggcactgttcagcgccaccctcaccccgccgggctattaccggggcgttctgggctgcccggatgcacgcgccgtcgccctggaaagccccttcccgcccgaccatctggggctgtactgcctgcccggcatctccacccgctaccgggacggggaggccagcatccccgccgtgtcggacgcactggcggcgctggccggaggaaaagtgggcaactatctggcctttttccccagctacgcctaccttcgccgggtctacgaagacttcacggcccggtatccgggcatcgccacgctgctgcaggagagcggcctggacgacgcggcacgggcagcatttttgcaaaaatttaccccggaccctgcgcagacactgctggggttcggggtgatgggcggcatcttcggggagggcgtcgatctggtcggcgaccggctcatcgggtgtgccatcgtgggggtcggcctgccgcaggtgaacccccggcaggagatcctgcgccgctactac

SEQ ID NO: 228 - DNA, 495 bp, Unknown
  BMI gene
  misc_feature: SEQ ID N?837740
atgatcctgcccctttttgccttcgtcaattcctatcgaatgacatcgccggttcaggtctcgcccgactatgccgtccggaaattccaagccggaacaggcaagccgattctctcggagttgccgcccgaagagcagtacgcttatctggaagaagcgggcgtgaatctgtcgggatatttcaattgggagaacagcgaggattttataatcgaaacaatccggcaagccgagacctatccgattgtggttggcatggcgtacagtaactccgggacagtgaccttttgtcaggaggtgcgggacgccgttaatcgctactacggcagagagcgattcctttcactgttgccggaagaggaacttgtcagccttcttggcggatacggcgttgaattcccggaagaaaacgcggaagaatacttttcccacgcccgcttggtcgttctcattgccgaaatgcatgatgtctgttaccccgtgcgcgacagtcgg

SEQ ID NO: 229 - DNA, 861 bp, Faecalibacterium prausnitzii
  misc_feature: SEQ ID N?838374
atgatggacccgaaggaactgatggcagaagccgccgtgctggaaccccagctgcaaaactggcggcgcaccctgcaccggcacccggaggtaggcttcgacctgccccagaccagagcgctggtcaagcaggcactcaccgagatggggtacaccccgcaggactgcggcaaggcaggcatccttgtgctggcgggcggcaaaaagccgggcaagaccattctgctgcgcggcgacatggacgctctgcccattcaggaggagtccggcgtggactttgcctctgaggtgcccggccggatgcacggctgcggccacgacatgcacacggccatgatgctgggtgctgccaagctgctcaaagcccacgaagaggagctggaaggcaccgtcaagctggagttccagcctgcggaagagatctttcagggctccccggatatgatcgccaacggcctgctggaagacccgaaggtggatgcggcggtcatgttccatgtgttggccggtatgcccctgccctccggcatggtgctggtgccgggcggcggcatcacgatggccagctgcgagcagtatcacatcaccgtccacggcaagggcggccacggctccatgcccgaagcctgcatcgaccccatcacggcggcggcgcatatccacatcgcgctgcaggagatcaacagccgggagatggacccgcacagcttcggtgtctttacgaccggccgcttccaggcaggtgccgcctccaacgtcatccccgacacggcggagatgtggggcaccatccgcaccatcgaccccgaaaacaaggtcggtgagctgatccacaagcggatgaccgagatcgcgcagggc

SEQ ID NO: 230 - DNA, 1113 bp, Anaerotruncus colihominis
  misc_feature: SEQ ID N?838524
gagcatatgctgattctcggcatcgagaatccgaagggcgaggtcaagtatgtcacggcggcgttcccgtcggcttgcggcaagaccaaccttgcaatgctcattccgccggaagtttaccgcaagaagggctacaaggcatggacggtcggcgacgacattgcatggctgcgcgtgggcgaggacggcagactctacgctgtcaaccccgagaacggcttcttcggcgtagcgcccggaacgaacgagcactccaactacaacgctctgatgaccaccagaaagaactgcatcttcaccaacgtgggtctcaacctcgacgacaacacggtctggtgggaaggcatgaacgatcagcccccgcacaacgccatcaactggaagggcgagaagtgggactacacgaagtatgacaaggcggacaagatcaacacgtcctgcgcgcatccgaactcccgtttcacggcaatggcgaccaactgcccctgcctgtcctccgaattcaacaacccgaagggcgttccggtaaccgcaatcatcttcggcggcagacgtgccaagaccgctccgctggtgtatgaatccagaagctggcagcacggcgcgttcgtcggctcgatcatggcttccgagacgaccgcagcggctgcaggcgcaatcggcgtggttcgccgcgacccgatggcaatgcgtcccttcgtcggctacgatatgggcgactactttgcgcactggctggagatgggcaagcgcattccgcacgctccgaagatcttccacgtcaactggttccgcaccgatgacgagggacacttcatctggcccggattcggcgacaatatgcgcgttgtgatgtggattctcgcccgttgcgcgggtgaggttgacgctgtggaaaccccgatcggatacgttccgaagcccgaggacatcaacattgagggtctggacggcgtgacggttgacacaatcaagaatctgctgacgattgacaagaacagctggcttgaggatgtggagaacatcaaggcgttctacaagcaggttggcgaccgcgtcccgcaggagatgtacgacgaactggctacgctggaagcaaatctgaagaagtaa

SEQ ID NO: 231 - DNA, 909 bp, Unknown
  BMI gene
  misc_feature: SEQ ID N?838525
gtggtggcaacctttggcgcggaactgttggagattgcccgtgcgcacggcgtgtcctatctgtttgaagcgagtgtgggcggcggaattccgatcatccgtccgcttcgggatgatcttgcctccaaccgcatcctgtcggtcagcggtattctcaacggaacgaccaacttcattctgaccgagatgggagagtctggcgcgacctttgcgtcggcgcttgccgaggcgcagaaacgcggctatgccgaggcagatccgaccgccgacgtagaaggcttggacgcggcgcgcaagatcgtgattcttgcggcgctgtccttcgggattctgctctcgccctcggagatcacggtcaaggggattacgcgtttgaccggggagcagaccgaggttgcggagtccctcggttgcgcggtgaaactgatcgggcacaccgagcggatcggggatcgtgttctggcattggttgagccgcacatggtgtcggagggcaacccgctccgccatgtcaacggcgtttacaacggaattctggtggacggaaatatgctcgggcgggcgttcttctacggtgcgggcgcgggcaaactgccaaccgcaagcgccgtggttgcggatattctgaacgcggtgtctcccgccgaaaatctgcagcttcccacatggcgcgtggcgacaaaggcggactacgcctctcccgcactccgtcgggttcgccgctgttttgtcctttcgggctgcgcgaactgcgcggagaaaacgaaaccgttcttcggctacgacagctatatcgtgcgggacggcaggtttgcgtttctcagccgccccatgaccgaagccgaagcgaacgaggcgctcgacgcctgcggcaaaaaacttctttggttcatgccggtactggactaa

SEQ ID NO: 232 - DNA, 723 bp, Ruminococcus obeum
  misc_feature: SEQ ID N?838528
gagactcttttggacgtttccggaggtgaacaggatcttgcaattccggctgcgagcaatgtatccgccaacggattcagcgaaagtggaagtgagcacggcattcttggagagatgggcgattatccggttgaagaggaaatgagtgattttgattcagaaatggatctggaaagcggaagcattgaaatgactggtcaggtcctgacagggatcattgcgatcctgcttctgatctcaacttgcggatacctggaaaatgcaatcattcattggtttggaggattcccgaaaagaagtgcataccagacattgaacgcaacgaattatttggaaaatgcgattcctgatgatgcagctggaatccgctggctgaatgataatgtcaatggccaacctgttgttcttgaagccagtggggacagttataaggattatgataaccgtgtttcagcaatgacaggactgccaacggttttaggctggtatgtgcatgaatggctgtggagaaataatctggaagaggaaaatcaacgaaaagaagatgtgcagaccatatacacttcaagcaacgctgagcaaataaaagctttgatagaaaagtataagatttcctatttattcatcggcagttgtgaagctgagaagtatggagagatcaatagcgaattattaactgcgcttggaaaagttgtttttcgacagggtgagacgatgataatt

SEQ ID NO: 233 - DNA, 1191 bp, Unknown
  BMI gene
  misc_feature: SEQ ID N?838721
ttgctgtgtgcgatcctgcttgtctgcgcacttctgccgtttgcgggatgcaaaaagggcgcgtccgacctcaaaatcggcgtgctgtgggaggacgatacctccggagaatcggcggcgtgggcgaaatacctgcgcacactggcaaaggaatacggctttacgattgactttaccaccacaaacagttcgtcctccgaggtgtcggcgatcaacacctacgcctccaagggttatgacgcgattctgttgctgtccgatgacgacattgtgacctcggtcaatgccgcggcggcaaagaagatgtatatcgtctgccccacgggtcacccgaccgacgaacagctgaaagaaatccgcggaaacgagtatttcctcggctcggttgcacccacctatgatgccgagtataccgcaggctacaacatggcgcgctactttgttgaggagaagaagcagaccgcctttaccgtgttcggcggcgcaacgctttacggttcgcagatgcacattcagcgccttgcggggattctcgcgtatctgtgcgaggacagcggaacttcctatgacggcgcgaaaacgcgggacgagctgattgccaaggttgcgggaacgagccttgatcccacaaaattcgtcagcgcaaagtaccgcattacaggatatatggacggtttcggttttgacgacgcgttctccaccaagctgaccaacagtctggagagcggaggaacttgcattctgacggtcggcgcgggcgaggtcgtgaccaaaattgcctacggaatcacctcggcaaacagcaggcttgagacttgcaccgtcggcggcgttgacgcgattacggcggattatgccgcgtgcttcgatctgggatacgcttatgactgcggcaagttcgcctcggcaatggcgccgtctatcatcatgattctgtgcgcaaaggacgggaagaaaatcaaggattccgagggttacgcgccgaaattggggctgagttactgggttgccacaagcaagaccgcgctggaagagatgctgaagcgcgacaatgcaaccgacgggtactgctacaacaaggcggttctggatcactatatcgaggcggcaagctacgatgagctgtcaaaactctgcgcggcggactacgcagaggcggtcgccattcacgaggcgtataacaaggagtaa

SEQ ID NO: 234 - DNA, 894 bp, Faecalibacterium prausnitzii
  misc_feature: SEQ ID N?839454
ttgctttcttttttcgttgataccaccgtctgcggcttttcgctgtatcagatctttgcttactttctcatctactcctgcatcggctggtgtctggaggtcatctacgccgccgtcacgaccggcaatctgatcaaccgcggcttcctgaacggcccggtctgccccatctacggcttcggcatggtcatcgtcctcttcgccctgacgcccctgtcgcacagcctgctcctgctctacctcggcggcgtcctcctgcccagtgcgctggaacttgtgggcggctgggcgctgtacaagctctaccacacccgctggtgggattacagcgactaccccttcaacatcggcggctatatctgcctggagttttccctgctgtggggcgtgggcaccctcatcgtgatgaagctcgtccaccccatcatcgccgatacggtggccctcatcccgccgctggtaggcctcatcctgatgttcctgctctacgccatctatgccgccgacaccatcgccaccgcctttgctgcgtccgacctggcccgcgacctggatgctctggaaaaggtggccgacagtatgcacgcggtcagcgacgccatgaccgagctgctgggcaccaacgccatggccatggaccagaagatggacgagagccgtttgcagttcaagctggcggccgccgaggcccgcgacaatgcggccaagctgaacgcccgtgaggcagccgctgccatgcgtgccaaggccgacgaggccatggaggccgcaaagcgggcctcgcaggacgccaagctcaacgccagcgaagctgccaatgccgtcaagctggcggccaaaggcagagccgagcgcacggccgaactgttccggctggaacagctggccgaggag

SEQ ID NO: 235 - DNA, 2256 bp, Unknown
  BMI gene
  misc_feature: SEQ ID N?839475
atgatttcctatcaaggcgcaaaaaccgagcgctatcagatgggacccgcgtccccctaccactacgtcacggacggaacgcagttcccgaccgaggagaaggagtacacctccgaggactgggaaaaggtcacgctcccgcacgattatcttgcgggggacggctacgaccccgcctgcagcgccgcgctcggcttctgcaaatacgacaacgggtggtatgtcaagcgttttgatgtccccgccgaggacgagggcaagcgcctgaccctgttgtttgagggcgtgacgggacacgcaaccgtgatgctgaacggttgtctgatgaagcacaatttctgcggttacacgccgtttgaggtcgacatcaccgacatggtgaagtacggcgcggaaaattcgcttgcggtgtttgtcgatatgaccgaacacgagggctggtggtacgagggcgcgggcatttaccgccccgtgcggcttcgcaaaaccgacctttgcgcgattgacctccggggcgtctttgcacgccccgagcggcaggcggacggcacttggattttccataccgagacgaccctgcgcaacgacagcgagcgggacgagcgcctgaccgtgaaaggggaaatcctggacgcggaagggcaggtggttgccacgtccggcacggagacgaccgtttccctgcgcgacactgcaaccctgcgctacgaatttgcggttggcgcgccgcggctgtggtttcccggaacccccttccgctacaccatgcgtacatgcgtctttcgcggggagaccgagaccgaccgcgacgaggtgaaattcggtttccgcacgatccgcaccgactgcaacgaggggctgtttatcaacgataaaccctatcggctcaaaggcttctgcgcgcacgaaagctgcggactgacgggaaaggtcatccccgaaactctgcaacgctaccgcgtgaagctgatgaaggagatgggggcgaacgcctaccgcacgtcgcactacccgcaaagcgaggaactgatggaagcgctggacgaggcgggctttctggtcatggacgaaacgcggtggtttgaatcgaccgacgaggggcgggaacagctggaaaagctcattaagcgcgaccgcaaccgcccgtgcgtgatcttctggtcaatcggaaacgaagagccgctccataccgacccgcgcggcgtgcgcatctgccgctccctgcgtgccctcgtgcggaagcttgacccctcccgcccgattctcaccgccgtgacccacaagggcggcagggtttatgacgagttggacgtcatcgggacaaattatctctggaagtacatcgacagcatccgcgcggcgcatccggacaagccgttcctctcttcggagtgcggcgcaacgggaacaacgcgggggtggtactatgatgacgacccgctccacggttacgtcagcgcctacgaccacgatgtcaacagcgctttcatgagccgcgagaacacatggaagcggattctttcctacccatggatgatgggcggattcttctggaacgcgttcgagtaccgcggcgaggcggtgtggccgcgcgtctgctcggtcagcggcgcggtggatctgtatctgcaacccaaagacgcgttctatcagcacaaggcgctctggagcgaaaccccgacggcgcatctcctgccgcactggaactttgcggggcgggagggcgaaccgatacgggtatcggtctacaccaaccaaccgcaggcggagctgttccttgacggagaaagtctcggaaaacgcgacatcgagcctgcgaggcacgccgagtggcaggtgtcctaccgtccgggcagactggaagtcagctgcgggaaggatgggaaaattcttgcaaccgacgtgcgggagaccacgggcgcggcggtggcgctgaagctgcgcttggaaacgccggacgtgaagaagggcgacacggcgctggttacctgctattgcctggacagcgcgggcagggaagtgccggatgctgcgcccacggtggacttcaccgcctgcgggggcggacgggtgtattccacggggagcggaaacgccgaccatacgccgatttttacgcccacccgcaggatgtggatggggcggatcagcgtggcggtcagactgacgggggattccctctgcagactgtacgcaactgccgacggactgcgcggcgcgggactggaaatcgggagcgaaaagcaggatatctga

SEQ ID NO: 236 - DNA, 744 bp, Unknown
  BMI gene
  misc_feature: SEQ ID N?839558
atgccgttctggggcggcggatgtctcggcgcgctctttaccccgattatttgcatggtgcttgcaattgtcatgatgatcggagtcatcggcggcggactgacaacgctgttccgcggcggaaatgttgtatacagcgaaaccaaaatgcaggactacgccaatcgacagtatgcaacgatttatgacccgagcagtgcgacttacgaggataatgtggtggttgtgtttctaacgaatgaggacaaccaaacctattacagcatcggatgggtcggtgacaatctcaaatcacaggtaagcaacctgttcggtaatgagaacaccgcgctcggctatgcgatgcagtcatccgtcacaacaagcgattaccgctactcgctcggttccaaccttgcacagatgaccgaaatgatggagacttctgtcaggaatcagaatcttgaaacggtctaccgcgcgcagaaggcggagagccacgaagcaggcaaggtgtacaaccggagcaactcggaccttcagatcaacgccgagatcattgacgcggcgctgaagaatttcaccgattcgaccgatatttcgatgtcgattgtgattgcggacgcgaaggacgttttcggcaagtccctgaacacctctgctatccttgcgttgcttctctgcatcatcctgatcgtttacgcggttgttgcaatcgtccgctacgtcaagcgccgcaagggaaacgctgacgactggaggtaa

SEQ ID NO: 237 - DNA, 660 bp, Eubacterium siraeum
  misc_feature: SEQ ID N?839671
cgcgacgcgctcgaaaagctccggctgaacgacgccgcgctgttgtttgaaccggagacctcggtggcgctcggcttcggcttccgttgcggttttctgggacttctccacatggaaatcattgaggagcgtttggagcgggaattcaatctggatctgattacgaccgcaccgagcgttatttacgagatccggctgaaaagcggtgaaacggtgatgatcgacaacccgtcgaactacccgtccgccgatctgatcgagtcggcgctcgagcctgtggtcaaggcaggcatcatcacgcccgtggactatgtgggcgggttgatggatctgtgtcaggatcgtcgcggggtgttccacgacatgaaatatctggatcagacccgggtggagttgcactacgacctgccgctgaacgagatcatttacgactttttcgacgcgttgaaaagccgttcgcgggggtatgcctccctcgactacgagctgaagggctacgagccgagcaagcttgtgaagctggattttctgctcaacggcgatcaggtggacgcgctgtcgttcattgtacacgaggacaaggcgtacgcgcgggcgcgcaaaattgccgaaaaactgaaggacaacattccgcgccagctgttcgaaattccgattcag

SEQ ID NO: 238 - DNA, 453 bp, Unknown
  BMI gene
  misc_feature: SEQ ID N?839772
atggttgctggtatcaaacggttatgcgcggttgcggcgttgcttggcgttttgctttcgctggtttctcttgcttcctgcacgggagcggagggaatcaatccggacggagcgcgcggggcggacgcggttgcaccgtcggagtcggaggatcgggatctgcggattctcatgctcggctgcgaccgcgccgcgtcgctgacagacagcattctgctcctgtccgtgaccccgcaaacgggacgggtgcgcattctgcagttgccgcgcgacacttatgcaaattacaccgagcgcgactacaggaaactcaacggggcatacaatacgctcggcgcggacggcacgcgggagtttctcagccgtgcgctcggtgtgcggattgattacacggcggtttacgatctggatgttgtccgagcggcggttgacgcagttggcggcgtggaggtc

SEQ ID NO: 239 - DNA, 630 bp, Clostridium acetobutylicum
  misc_feature: SEQ ID N?839773
atgacagagagtacagaggaaagactcaaccgactgcgcgaaaccgtgcgggcgcggctttccgaaaaacgttgccgccatacgctggcggtggaggacatggcggcgcgactctgtgcgctgtactgccccgaagagaccgaaaagctgcgggcggcggcactgctccacgatattaccaaggaactgtcggtttccgagcaggtggtgctctgccatgcatacggcattccgatcagtgaggacgatctgcttgcgcccaagaccctgcacgcgcggactgcggcggcgcagattcccgtggagtatcccgaatatgacgatccgaccatcgtttcggcggttcgttggcataccacggggcacgcggagatgacgctgaccgaaaaactgctctatcttgccgattacatcgacgactcgcgcacattctgcaattgcgtgattctgcgccgctatttctggggcgcgaatccgcagtcgatgacggcgcagacgcgggaagcactgcttcgcgacacacttctgctttcctatgacatgaccgtgcgggatttgctcgatgagggtacgcctgttgccgttgatacgatcgaagcaagaaatgagttgttgcgggggaagggataa

SEQ ID NO: 240 - DNA, 1308 bp, Unknown
  BMI gene
  misc_feature: SEQ ID N?839849
atggataccctgcattttgacctctcccatccgctcggagacttcaagccgctgaatgcggtcaacaacggtcctgttcacaagcgccacgcaggcgaccaatacatcgacaatctggaaacctaccgcgccgcgaagattccgtttgcgcgcaaccatgacgcgtcgttctgcaacagctacggcggttcgttcacggttgatatcaccgcgattttcccggactttgacgcggatgtcaacgatcccgcgtcctacgattttgcctgcaccgacgaatacattgcggtcacactggaggcgggaacagagaccttctaccgtctcggtcagcggatcgagcacgagatccgcaagcacaacaccctgccgcccaaggattttcacaagtgggcgcggatttgcgagcacatcatccgccactacaacgagggctgggcggacggctaccgtcacaacatccgctactgggaaatctggaacgagcccgaccttgacgcggacgactcccccaacaagcggacatggggcgggacgaaagcgcagttcttcgaactttacgaaatcactgcgaagcatctgaagtcctgtttcccgaacctgatgatcggcggccctgctttggcacacagtcaggaatgggcggaagattttctggctcttgccgaggaaaagcatctgccgcttgactttttctcatggcacgtttacggcacgacgcccgagaaggtcatggggcgcgccgcgcgcttccgcgagatgctcgaccgtcacgggttcacgtcaacgcagagcattctgaacgagtggaactatgtgcgcaactgggacacggaatacgtttactccattcaccagattcagcgtttgaagggcgcttccttcgcgctcgcctgtatgtgcgaggcgcagaaatcgtcgattgatatactgatgtactacgacgcgcgcccgtgtgcgttcaacggtctttttgcgccctacacgttagagccgctgaagggctactatccgttcctttggtacgggatgctttacggcaggcgcgagattcgcaccacaaatacagcggagcacatccactcgctttgcggcatggatgaaaacggcaagacgctaacgcttctgacgcactacgatgaggacgattccgcggcggagcggtcggtcgcgctcgatttcgggaagcagtcggtttacgaggtttaccttctcgacaacgcgcacgacggcgttctcctttgcgagacaagcgacccggtattcacgctgcccgttcacacctgtttgttggtgaaggagaagtaa

SEQ ID NO: 241 - DNA, 549 bp, Unknown
  BMI gene
  misc_feature: SEQ ID N?840036
gagtccttcccgtacacgagcgaacgcgcacgggaaaaggtgttcgaactggcgcgcatcatggcgcagtatacggggagcattaacctgcacgtcgtgtcgttgacgcatattcaggaactgctggtcaaaaactgtgaggaggattacttcacactggttctgcggcggtatatgatgacgattgccgaccgactggcgcacagtctcggctgtgggggactggtcacgggggagaccctcgggcaggtcgcgtcgcagaccatgcaggcgctcggggtaaccgaccccgcaaccacgctaccggtgttccgcccgtgcatcgggttggataaagaggagatcatccgcgtggcgcggaagatcggaacgtttgagacttcgattcaaccgtatgaggactgttgcacggtctttacgccgaaacacccgaaaacccgccccgagcttgacaaggttctggaacagcagaaccgactggattttgaagcccttgtagaggaagccatcgcgggcgcttatgtacagcgcatccgcatcgaattctga

SEQ ID NO: 242 - DNA, 657 bp, Unknown
  BMI gene
  misc_feature: SEQ ID N?840300
atgagaaagaaaaagcacggcgccgagcggattgccgcctgccgcgaacttctgattgcccccccgacgcttcccgcgcccgacccgcagacctatttccccgccccgcgcccgctcagtcttgagatcggttgcggcaaaggagactttgcggtcggcatggcggcggcgcacccggacgaaaactggattgcgatggagcgcgtttccgatgttgcctgccttgcgcttgaaaaagcaatggcggcaaaggacacgcgtcccgataatctgcgttttctcatcggagacgcgcgcaatcttaccgattggtttcccgcgcactgcgcggatgcgctttacctcaatttcagtgacccgtggccgaaagcgggacacgcgcgccgtcggctgacgcatcccgactttctggcactctaccgccgacttctgaagccggacggtctgctccgtctcaaaaccgacaacgaaggactgttcgactacagtctggagcagttcgcgctctgcggacttcccgtggaatggatgacgcgcgacctgcatcactccgagcgcgccgccgacaacatcatgaccgaatatgagcggaatttttccgaaaaaggacaggtcatctattccgcatgggttcgcttcccgaaggaggacgcatga

SEQ ID NO: 243 - DNA, 933 bp, Ruminococcus obeum
  misc_feature: SEQ ID N?840950
gctgcgatgcgatacacagaggctcgtctgagcaagatctccatggagatgcttgctgatatcaacaagaataccgttgatttccagccgaactttgatgagacagaacgggagccggttgtacttccgtcccgttatccgaaccttcttgtaaacggtacttccggtatcgcagttggtatggcgacaaacatcccgccacacaacttaagagaggttatcaatgcagttgtcaagatcattgataacattatcgaggaagacagagagacaacgatagaggaacttcttgagatcgtcaaaggaccggatttcccgacaggagcaacgatccttggaacaagaggaattgaggaagcatatcgtaccggccgcggcaagatccgtgtccgtgcggtgacaaatatcgagacactgccaaacggcaaatcacgcattattgtcacagaacttccatacctcgtaaacaaagcccgtctgatcgaaaagatcgcagaacttgtccgcgacaagaagattgacggaatcacagacctgaatgaccactccagccgtgagggaatgcgcatctgcatcgacctccgcagagatgccaatgcaaatgttgtcctgaaccagctttataagcatacacagcttcaggatacatttggcgtgatcatgctttgccttgtttccgtaaacggaagccttcagccgaaggtcctgactcttccggagatgcttaagcagtatcttgcacatcaggaagatgtagtgacaagaagaaccaaatacgacctgaacaaagcacaggaacgtgctcacattctggaaggtctgctcaaagcactggacaatatcgatgaagttatccgtatcatccgtgccgcaagaaacgttcagatcgcgaagcaggaattaatggatcgctttgaactgacagatgttcag

SEQ ID NO: 244 - DNA, 645 bp, Unknown
  BMI gene
  misc_feature: SEQ ID N?841058
atgaagcacaattatctgaagcaactgaagtccggcattctcgaccagaaccccacgcttgtgcagcttctcggaatgtgcccgacgcttgcgaccaccacgtcgctgaagaacgcgttcggtatgggcatggcggcaacggcggtgctgatctgctccaacgtgttcatctcgctcctgcggaagttcatccccaagcaggtgcgcattgccgcctacatcgtcatcgtttcgggctttgtcacggcggtggaactgctgatgcgaacctacatggtttcgctctatcggtcgctcgggctgttcattccgctgattgtggtcaactgcatcattctggcgcgcgcggaggcgttcgcttcgaagaatccgccgctgccctcggcaatggacggtctttcgatgggactgggcttcacctttgccctctgcattctcggaacggtgcgcgaactgctcggttcgggttcgcttctggggcatcgcattctgcccgaggcgtatcccgatatggtcatcttcattctgcctgcgggggcgttcctgacgctcggatttacgattgcggcggtgcagaagattaaggataccgtggaagaaaagaaacgccgcgcggcggaggacggaaaggaggagcaggcatga

SEQ ID NO: 245 - DNA, 1155 bp, Unknown
  BMI gene
  misc_feature: SEQ ID N?841336
gtgactgacatggcaagaattgttctgaacgaaacatcctatcacggcgcgggcgcgattcatgaaatcgtcggagaggtaaaaggcagagggctgaaaaaagcaatggtctgctcggaccccgacctcgttcgcttcggcgtaaccaagcgggtactcgacgtgctcgacggtgcagggcttgcatatgagctgtactctgatatcaaacccaaccccaccattgaaaacgtccggtcgggcgttgccgctttcaagaagtgcggcgcggattacctgattgccatcggcggcggatcttccatggatacctccaaagcaatcggtattatcatcgcaaaccccgagtttgaggacgtgagaagccttgagggcgtcgctccgaccaagcatccgtccgttccgatcattgcagtccccacaaccgcaggaactgccgcagaggtgaccatcaactacgtcatcaccgacgtggagaagaagcggaagtttgtctgcgttgatgtccatgatattcccgtggtcgcaattatcgaccccgagatgatgtccaccatgccaaaggggctgaccgccgcaaccggtatggacgcactcacgcacgcaatcgaaggctatattaccaagggcgcatgggaaatgaccgatatgttccatctcaaggcgatcgagttgatctccaagagtctccgcggcgcagtggcgaataccaaagagggcagagaaggcatggcgctcggacagtacattgccggtatgggcttctccaacgtcggtctcggtatcgtccactccatggcgcacgcactcggcgcagtttatgataccccccacggcgtggcaaacgcaatcctgctcccgaccgtgatggagtataacgcacccgcaacgggcgagaagtaccgcgacatcgcgaaggcgatgggcgtggaaggcacggaaaagatgtcgcaggaagagtaccgcaaggcggcagtcgaagcggttcgtcagctgtcgaaggatgtcggaattccgcaggatctcaaggcaatcgtgaaggaagaggatgtccgcttccttgccgaatccgcaatggcggacgcctgccgtcccggcaacccgaaagatccgacgctcgaggatatcatcggtctgtaccattccctgatgtaa

SEQ ID NO: 246 - DNA, 396 bp, Faecalibacterium prausnitzii
  misc_feature: SEQ ID N?841501
atggcaaagaaaagagggggcctcggccgagggctggaaagtctgttcgaggacgtttcgcccagctttgagcccgacaatgcaaagatcgagaccctgccgctgcgggagatcgagcctgaccccgaccagccccgcaagacctttgatgacgagacactggccgagctggcctccagcatcgctgaacacggcctcatccagcccatcgcggtgcggcccaaggtgtccggcggctacctcatcgtggcgggcgagcgccgctggcgggcctgccggatggcgggcctgaccgaagcaccggtcgtcgtgaaggacgtcaccgacgagcaggccatggagatcgcgctggtagagaacctgcagcgcgaagacctggacccggtggaagaggcc

SEQ ID NO: 247 - DNA, 204 bp, Unknown
  BMI gene
  misc_feature: SEQ ID N?841687
ttcctgcggaatccatgtcagacgaaggcttcgcccactgtcgcggacgacaacgcggtaagtgccgtcgttgtcatcgtacccgcacagaatgccctcctcccttttgcgggacagatcgaaaccatccgcgccgcgacagtaaagatagaaacccatgcgcaacagatcccgaacaatccgacggcagtgcggaagccatga

SEQ ID NO: 248 - DNA, 1269 bp, Unknown
  BMI gene
  misc_feature: SEQ ID N?841753
atgaaacttcttgttgtaggaagcggagggcgtgaacacgccatcatcaaaaagctgaaggaaaatccgacggtggaagtgatttacgcgctgcccggaaacggcggaatcgccgcagacgcagtctgcgttccgatcggcgcgtgcgaaatcgagcgcattgttgcgttcgccgttgaaaaacacattgattttgcggtcgtcgcgccggacgacccgttggtgctcggctgtgccgatcggctcagagaggtcggaatcccctgcttcggtccgggagcaaatgccgccatcatcgagggcagcaaggtctttgccaaggatctgatgaagaaatacggaattccgactgcggcatacgaaacctttgacgatatggatcgggctttggcatatctggaaacttccccgcttcccgtggtgatcaaagcggacggtcttgcgctcggaaagggcgtgaccgttgccgcaacccgcgaggaagcagtccgtgccgtaaccgaagccatgcgggacaaaaaattcggaaaaagcgggaaccggatcgtcattgaggaattcctttccggtcctgaggtttcggttctgacctttaccgacggaaaagccgtagttccgatggtctcgtccatggatcacaagcgcgcgctggacaacgaccgcggacagaatacgggcggcatgggaacaatcgcgcccaatccttactacacgaaggaaatcgccgaacggtgcaaaaaagaaatcttcctcccaaccgtggaagccatgaaccgggaggggcgaaccttccgcggctgtctctatttcgggctgatgctgacgcaggacggaccgaaggtgatcgaatataactgccgcttcggtgaccccgagacgcaggtggtacttccccttctggactgcgacctgctcacggtcatgcaaaagaccgagaacggaacgctctccgaatccgacgtccgaatccgtgacggcgccgcctgctgcgtcatcatggcatccaacgggtatcctgcatcctatcaaaaaggatttgagattcggattccggaagacctccgccctgcggtttcggttgcgggcgccgctctggaaggagacaaactgctgacaaacggcggcagagtgctcggggtcacggctgtggcggacacgctccgcgaagcgatcacagacgcgtatcggatggtggaaaaaatttcgtttgaaaacgcttattacagaaaagacatcggcaaaaaggcgctgatgggaacggagaactaa

SEQ ID NO: 249 - DNA, 1182 bp, Clostridium leptum
  misc_feature: SEQ ID N?842017
atgaaattacattacgtcgcaacctgcctgttcgggttggaaaaaacgctcggcgaggaactggacgcgttgggacttgcgcgcaccgaaaccatggacgggcgggtcttttttgagggggacgaatccgctctggcgcgcgcgagcatcggtctgcggtgcgcggaacgtgtgctgttgctcctcggtcgcttccccgcagagagcttcgacgcgctctttgagggaacaaaagcgctcccgtgggaggactggatcgggcgaaacgacgcgtttcccgtcaaagggcacgccatcaaaagcaagctgcactctctgccggactgccagagcatcgtcaaaaaagcgggggtcgatcgcctgtcgggcgcttacgggcagaagtggttcgccgaggcgggcgtgaaataccagatcgaattttttatcttcaaggacgtggcgcacctgatgatcgatacctcgggcgtgaccctgcataagcgcggctaccgtcccgacgcgggcgaagcccctttgcgcgaaacgcttgctgcggcattggcttacaacgccagaccgcgcgcggacgtcctgttctgggatcccatgtgcggctcggggacgattgcaatcgaggcggcaatgatcctttccaaccgcgcgcccgggttggggcgtacctttgcggcggaagattttccgcagattccccgcgcagtctgggcgaacgagcgggcacgcgccgaggcggcaatcctgcacgacgcggattacgaggtctgggcttccgatattgatgaggaaattctggacgtgacctacgaaaacgccctgcgcgcaggggtggaggatcggattcgcattttcaacgccgacgtgcggaaaatcgaaaagcctgaccgccgcggaacgatcgtctgcaacccgccctacggcgagcgcctgatgacccccgagaccgctgccgcactctaccgcgaaatgggcaatcatctttggacctttgccccgtggcatctctatgtcattacctccaacccgcagttcgagcgcctgttcggtcacaaagccgacaaggttcgcaagctctacaacggcatgattccctgcaacctctaccagtatttcaagtacgaaaaagaacgcggaggacgcgggggacacaagggatgcgaaggacgcgctgggggcacttcttga

SEQ ID NO: 250 - DNA, 696 bp, Bacteroides capillosus
  misc_feature: SEQ ID N?842122
agcttcaccgcgcactactacggcgacccgcagaagcgcgagctgacgagcgagcaggatgtgcagtccgttcaggccgcgctggaggcccagccgttttccgtgaccggcgtgaagaaatcggagaaaaagcgcacccccgcgccgccgttcacaacctcgaccatgcagcaggaggcttccaaaaaactgggcttccagtcgcagaagatcatgaaagtggcgcaggaactgtacgaaggtgtgaacctcggaacggaattcggcggcacgcagggtctgattacctatatgcgtaccgactcgctccgtgtttcggcagacgcgcaggaggcggcaaagacctttatcacgggcaaatacggcgagaaatactatcccgagaccccgagaatttacaagaccaaggcgggcgcgcaggacgcgcacgaagccatccgccccgcaagagtggatcttgaacccaccaagatccgcaagctgctctcgaacgaccagtacaaactttacaagctgatctgggagcgcttcattgcaagccagatggagtcggcagtactggatacggtgtcggtggacttcacctgcgcgggatatatcttccgcacaagcggctattcggtcgcgttccccggctatatggcggtttacgaagaagccgaagaggattccgcgcgcgcggcggacgatgtggcg

SEQ ID NO: 251 - DNA, 450 bp, Alistipes putredinis
  misc_feature: SEQ ID N?842614
ccctgccacgtcctctatcatttccatgatatggtcaatcggaaagccctttttctgggctttctcaataatactggaaatcttcttcaccctgccggcgacccgttcaatctgattgtccgcgccgtagacaacaaaaccgacccgatgtcgatcgtacgggtattcgccatgaagaacaaccgaaaacaacgctcggcagtcatctcggccgtaggttcgttcaacgtcacatccaacgatatggagtacctgccctttaccgcagaaaaatacggagaaaactcctattacctgactttcggagatgcccctgccggtgaatacggcatcatcgtcaccaaccccaacaatgtcgatgaaaaaatgatcatcgtatcggctttcggaatcgatccggaaaaaatgcctgctgcatccggttccgaaacggcagaggacacagagtaa

SEQ ID NO: 252 - DNA, 783 bp, Faecalibacterium prausnitzii
  misc_feature: SEQ ID N?842632
atgcgggaaacagaccttgccgatgagctgttccgggcaccgggcagtgcaccgcctaccggtgtgcgggtggccacagcccggcgcggcggcgtgaccgtgacgcgggtggagatcgcgcgcgaagggctggagcgcccccgcgggcggtacgtgacgctggaaatgcctcgcgtcagcctgctggacgagcgagacgaagcggtcatcgaaccggctgcggcagagctgcaggccctgctgcctccggcagggccggtgctggtgctgggcgtcgggaaccggcgggtgacctctgatgccctcggcccccggaccgtgcagaaaattttcgtcacgatggggcagcatgccgtcccggtgcagggcatccggccggtggcggcagtggcaccgggcgtgtcggctgccaccgggctgagtttgcagcagctggccggggcactggtgcgggagatccgccccgctgccctgctctgcgtggacagcctctgctcttccgaaccggagcggctgggccggaccctgcaattctcggacaccgggctgttcccggcccagcccggccacagccgccatctggatgccgcccggctgggggtgccggtcgtagcggcaggcatcccgaccctgatgcaggccgaggagggcagcgaccttgtagtgacccctcgcgagctggacagcgtcatcgcccacggggccgccctgctggccgcggccatcaaccgtgctttgcagccccgcctgagcattgcccagctgggctggctgacgagctga

SEQ ID NO: 253 - DNA, 339 bp, Unknown
  BMI gene
  misc_feature: SEQ ID N?842665
ttgacaaacaggaaaataaagggtataatggaggcgtcggcggaactcctgccgaataacagaattcttaaggatcttaaggagaggaatgctatgaaatcaacaggaatggtgagaaaggttgacgaattgggaagaatcgtgcttcccgcagagatcagacagaacatggacatcgagacccgtgactcgctggaaatctataccgatggagaccgcatcattctgcaaaaataccatcccgcgtgcattttctgcaccaatgcggacaatctggtctacttcaaccagaagcgcatctgccccgagtgccttgcgaaaatcaaagcgcttgactga

SEQ ID NO: 254 - DNA, 426 bp, Gramella forsetii
  misc_feature: SEQ ID N?842686
atgatcgaatttgcgataacccgagaggagaacaaaatgcttctgacaaaagaggaatggttggcgcctttgcgcaagaccgtcagcgaacgggatgcctgcctgttggacgctgcctatgaggttctgaaacggaacaccgtccatgagaaaagcgcgccgtggggtgatgtccccgtcatttcgccgtggtcaggcccttgcgcgggaatctggaactgggattccgcgttccatgccatggcggtttcacgctacgacacggcgcttgcaaaaagctgtatcgacgcgttcatcaactttcagcttcccacggggatgtttcccgacgtgatttatgttgacggcagaatctgcgacaactacggcaagccgcccgtgctcccgtgggcgacgatgattgtctatcaccgtgacggggaccgc

SEQ ID NO: 255 - DNA, 1095 bp, Faecalibacterium prausnitzii
  misc_feature: SEQ ID N?842874
atgcctctccgcaccctcccggagcaggccttccgccgccgggcgcggatggtggccgtgctattctgcgccgtctgcctggggctggcggcgcggctgttttatttgcagctgcgcaccagccgctggtacaccgaccgcgccctcggccagcaattgcgggacaccgtcgtgcccgcggaccggggcaaaatctacagcgccgacggcgttctgctggcggcgaacagcagctgctggaccctccgcgcctcgccccgcgagatgccagacgacaagctctcccttgccgccgagggccttgcagacatcctggacctcgacgcggccaacttgctggaatcgttccgcgaccgccgctccaacgactgcctgctccgctaccgggtggaccgcaccaccgccgaccgggtgcgggcgttctgtgaggccaacggcatcaccggcatccgcatcaatcaggactccaaacggtggtatccgcaggggcagttcctcgcgtcggtgctggggttcaccaatgtggacaacgccggggtctccgggctggagctgcagtacgacggcctgctcaccggcgagaacggcgtggtgctgactgcggtcaacgcctggggctacacgctggaacagagctacgagaccgagcgttttcccaccgagggcgacggcctgcggctgaccatcgacacccagatccagcactatctggaaaacgcactggggtacgcggtgcaggaacaccatgtggccgcgcgggccgtgggcatcgtgatggacgtgaacaccggggccgtgctggccatgtccaccaccccctcctacgaccccaacgagccccgtgtcatcgcggacgaagccacccggaatcaggtggagagcctttccggcgaggcgcgccgtgccgccctgcagctggcgcagcagacccaggggcggaacaaggcagtcagcgaccactacgaggcgggcagcgtcttcaagctcatcacctgcgccgccgcgctggatgccggggccatcacccggcattccagtttctactgcggcgagtccatctcggtggccgggacgcggttccactgtgccaaccac

SEQ ID NO: 256 - DNA, 525 bp, Unknown
  BMI gene
  misc_feature: SEQ ID N?844031
gcggaagaatccattgaggaaatccgcgcgctgttggaggggactgatatggtctttatcacggcgggtatgggcggcggcaccggaacgggcgcagctcccgtattagcgcgggttgcaagagagatggacattctgaccatcggtatcgtgaccaaaccgttcgtgtttgagggaagcaagcggatggcgcaggcagaggcggggattgcagaacttgcgcagtttgtcgattcgcttgttgtcattccgaacgagcgtctcaagcaggtttccaatgcgaaaatttcgctctccaatgcgttcggcattgccgatgatgttctgcgccacggtgtgcagagcatttccgacctcatcaatgttcccggctttatcaaccttgactttgccgacgtgaccagcgttatggcaaacgcgggctacgcgcacatgggcgtcggctctgcaacgggcaaggacaaggcggaggaagccgcaaaggaagcggtttccagtccgatgttggaaacctccattcgcggt

SEQ ID NO: 257 - DNA, 783 bp, Clostridium thermocellum
  misc_feature: SEQ ID N?844100
atgagcggatgtgaaggataccgcgcgctcgcgggcgtttacgacctgctcaatcgggagatcgattacaccgcatgggcggattttatcgagcaatgctttgaccgttatcttcccgcccgccccgaattggtactggatcttgcctgcggaaccggaatcatgacgttggaactgtcacggcggggctacgacatgatcggcgttgacggaagcgccgatatgctctcccgcgcttatgccgccaaacccgaagattcaaacgtgctgtttctggagcaggatatgcgctcgttcgaactgtacggaacggtcggcgcggttgtctgctgtctggacagtctgaactatcttctcggcaacggcgaccttgccgcctgtttccgaaccgtgcacaactaccttgatcccggcgggctgttcctgttcgatatgaacacgccgcacaaattccgcacggtttacggcaacaatgcctatgtattggaagccgagcgcccggaagaggacggcgggacggatattttctgcgcatggcagaatttttacgacgaaaaaacacgcgtctgcgattttgacctttccattttcgaggaacaaccggacggctcctacctgcgctccgatgagcatcagcaggagcgttgctatgatttggaagagatccgttctgcacttgcaacctcggggatggagttgctcggactgttttccgactaccgcttctccgccccgaccgggcaaaccgagcgttggtattttgcggcgcgcgccatcaaataa

SEQ ID NO: 258 - DNA, 1392 bp, Unknown
  BMI gene
  misc_feature: SEQ ID N?844355
atggcaaaaacaagaccggaaagcgattcaatcggaacgctggaagtccccgcagaggcatattacggagttcagaccctgcgcggacttcagaatttccacatcacggggaatccgatggacaagcggttctaccgcaacattgtccgcatcaagaaggctgcggcgctgaccaaccgtgaagcgggactgttggacgacaggatgtgcaacgccatcaccgcagcctgcgacgaagcgttggaaggtcagttggacacgtggttcatcaccgacgcaattcagggcggcgcgggcactacggcaaacatgaacgtcaacgaggtgattgcgaaccgtgcaaccgagttattgggcggcaaaaagggcgaatacctctgccacccgaacgaccatgtgaactgctcgcagtcaaccaacgatgtgatccccacggcgggcagactgacggtcatcgggcttgcggaggaactgttccgcaacacgcaggcgctgaccgacgcgttggacggcaaggcgcgccaattcaacgacgtcatcaagatgggaagaacacagctggaggacgcagtgccgatccgtctcgggcaggaatttgcggcttactcgtcgggcatcaagcggtgcgtaacgcttctgcgcaaggcggtggacgaaatgcacgcggtcaatctcggcggtacggcaatcggaactgcaatcaacgtgcgacgcgcgtatctgtgcggtgtggttcccgccctctcgcgcatcacgggctacgagttgcaccaagcggcggatctgatcgacgcaacacagaatctggacggtttcgtttatgtctccggcgcgctcaaggcaatggcggtggcgctttccaagatgtgcaacgacctgcgcctgctttccagcggaccgaaaacgggttttgaggaaatcattcttcccgccaagcagaacggttcgtccatcatgccgggcaaggtaaaccccgtgattcccgaggtggtatcgcaggtggcgtttgccgttatcggaaacgacacgacggtcacgcttgcggcagaagcgggacaattggaactgaacgccttcgagccggtcattttctacaagctgtttgaatccttcatctgcatgaagaatgcggtcaagacactgacggagaactgcattgtgggtattgagtccaacaaggagcactgcgaagcgcttctgtatgaaagcgtcgggacggtaacggcgctttgcccgtatctcggctacaagaaatcagctgaacttgcaaagcaggcgttacgcgaaaaccgccgcatcaaggatctcgtccgcgagcagaaactgattgacgacaagctgttggacgagcttctggatccgttcgccatgaccgaaccgagcaaggtgtga

SEQ ID NO: 259 - DNA, 966 bp, Ruminococcus torques
  misc_feature: SEQ ID N?844356
ggcgcgaacgaagcgccgcccgccgtgatttcgatgttcctcggcgaagaactgactgcggttctggacgcaatcgagaacgatactccctacaacgcagcggaaaagacggttatgaagcttggcgttcacgtcctgccgcgctttacccgcgacacaaccgaccgcaaccgtacatccccgtttgccttcaccggcaacaagttcgagttccgtatgctcggttcttccaacagcattgcctgcgcaaatatcatgctcaattcggcggttgcggagtctctccgcgtttacgccgaccgtctggaaaagtccaagcactttgaagcggatctgcatgatctcatcaaggagacggtcagcgatcacaagcgcatcatcttcaacggaaacggctatgacgacgcatggattcgcgaagcaaccgaggttcggggattgctcaacctgcgcaccacgcccgacgcaatgccgcacctgctcgaccccaagaatgtggaaatgctgacccgtcacaaggtattctcccgcaccgagctggaatcgcggtatgagatcattctggaaaactactgcaagtcggtcaacatcgaggcgctgaccatgatcgacatggcgcgcaaggagatcctgcctgcggtggaagcctatgcgcatgatctctccgacacgctgatcgccaaagcggcggctgtcccgggactttcgggcagatatgagaagaatctgattgcaaagctctccgaactggcggacgagatcgacagcgccatcaccgcactggagaccgaagccatccgctacaaaaccattaccgacgtcaccgaagcggcgttcatgatccgcgacgtgattctgcagagaatggcggagctgcgcgtggtctgcgacgaggcggaaacgctgacggcggagaagtactggccgttcccgacctacgaaaagctcctgttcggagtcagataa

SEQ ID NO: 260 - DNA, 888 bp, Unknown
  BMI gene
  misc_feature: SEQ ID N?844453
atgttcgcctcgcgccccaagctgaccgcgttcatgtgcctgctcatggcggtcggaatgctgggactgttctttgcgacctcgatgttcgacagtatgaacgatctgttcgagccgaaccggatgttccgccacgtggacgggcgcgtgatcttcacccgccgcgacggcgcgcccatgaccgacgaagaggtccggcaggcggcggaaacctacggcgcgaaaacctcgctccactacgaccgcctgattgacagcggcaatgtttacgtcaccgaaaacggcgtcaacaaaagtgtgctggttcgctttacctacggagagaaggcggacgggaaggtctacggtcgctaccccgaagccgcagacgaggttctgctctgcctgccgatttacatgaaaccggcatacgggacgaaccccgaagccctcggcaaacggcttgaacccgactattcgaaacgctacggcaatttccgcgtggtgggcgtttcctactactacgacaacaccaaggacgggaaagcgattttcagcgagtcgggctacaatgccatgctcggcgcgaaaacactgctggatcagaacagcaagatttccgcaaccgtgacgggaacggacggcaaagaagttctctgcagcattgaggacatccgcgttgacagcagctattcgggattttccattgcgggcaagaacctcaaagccgaaacaatcggctcggttaccctgcaggcagcctattacgtctacaattacataagcgccgacagctacggcgaaaaagagcgggttcagacctggacgctggacaccgcgcagatgaaactcggggattccgccccctattccgacccgaacagctacacgctcaccatcggcggcgac

SEQ ID NO: 261 - DNA, 867 bp, Elusimicrobium minutum
  misc_feature: SEQ ID N?845074
gacctgatcggaaatcccgacattgacataatcgacatctgcacgccgaacaattgccattaccggacggtgaaaaaggcactggcagcgggcaagcacgtgctgtgcgagaagccgctttgcctgaccggcgcggaggcggacgagcttgccgcactggaacgcgcaagcggcagaacctgcggaatggtgttcaacaaccgttggttagctcccgtgatgcgcgcgaaacagttgattgacgaggggcggctcggcgatctgatcagttatcatgcggtctaccgccacaacagctgtcttgaccctgcgcggcgcgccgggtggaagcagaaccgcgacatttgcggcggcggaacactgtttgatctcggctcgcacgtcatcgatctgatgacatggctctgcgggcggatgatccgcgttgcggggcatgcgcagattgtttgccccacgcaccttgaccgcgacggcaacgaatggcgcacgaatgcggacgaggcgttttacatgaacgcggagacggcggacggcgtattcggcacaatggaattcagcaaggtgacggttggagagaacgacgatctgtcgtttgaaatcttcgggcgatccggcgcgctgaaattctccctgatggaaccgaactggttgtatttttacgacgcgacgcttcccgacgcaccgctcggcggatcgaagggctacacgcgcatcgagtgcgtggggcgctacccgggcatggtattcccctctccgaaagcgcctgcggggtggttgtatgggcatctgtactccatgtacgcattcctttcggctgtggcggagaaccgcccgttctcgccctcccttgcggacggggcggaggtt

SEQ ID NO: 262 - DNA, 612 bp, Unknown
  BMI gene
  misc_feature: SEQ ID N?845221
atgttaaacgcagcactgatcggatacggaggcattgccaaagcgcatgaaaacggatacagaatccttgaaaaagaagggaaggtccggcttgttgcagcctatgatatccggaaagaagcctttgacagcacagcggaaatcaatctgaaaaccgatatgaccgaaacggacagaaccttccgatgctatacggatcttgaccggatgttggaaacggaaacggtagattttgtagacatctgcgttccgtcctatctccacaaggaggttgccgtccgcctgctggatcgtgggtatcccgttctttgcgaaaaaccgatggcactgaacagcgaggattgcgccgaaatgctggcggcggaaaagagaagcggaaagccgctgatgattgcacaggtgctgcggttcttcccggaatatgagtatctgaaagcctgcatgaccgatcgcaggttcggcaatcccctcgcagcctccttcgggcgctacagcaatcccgcaacatggggatgggaaaactggtttatggattacggcaagtccggcggatgcataaccgatctccatgtccatgatattgacatcgcgagatacctgttcggagagccg

SEQ ID NO: 263 - DNA, 243 bp, Unknown
  BMI gene
  misc_feature: SEQ ID N?845450
atgtcaatcaaggacgcggtggtattgcgctttcggcacttgtgcatggagcggttgatcacttggaacgagttggcaacccgctcgggagtcacgccgtcaaccgtttacagtatgctcgacccacggcgcagggaactttcggtcgtaaccgtcaaaaagctttgcgacggtttggatatttccatctccgacttcttcgatgacgagattttccgctcgcttgaacaggagacacagtaa

SEQ ID NO: 264 - DNA, 633 bp, Alkaliphilus oremlandii
  misc_feature: SEQ ID N?846226
cgcgcggacgcgccgggcgcggtgcgtgacctgcacggtgcgggaattcaggtggtcatggtgacaggggacagccgcgaaacggcgcaggcgatcgccgtgcggtgcggcattctcggcggggcttacgatgtgatcctgaccgccgacgaaatggcggggatgtccgatctgcaattgaaggaactgcttccgcgccttgcggtggtggcgcgggcgcttccgaccgacaagagccgtctggttcgccttgcgcaggaatcgggcagggtcacgggcatgacgggggacggcatcaatgacgcgcccgctctgcgccgcgccgacgtcggctttgcgatgggaagcggcacgcaggtggcgaaggatgcgggggacattgtgattctcgacaaccgtctttcgtccattgtgcgcgcggtgctctacgggcggacggtgttcaagagcatccgcaagttcatcacgcttcagctgaccatgaatttttcggcggtcggggtgaccatgatctgtccgtttctcgggatcgattcgcctgtgacggttgttcagatgctctggatcaatctgattatggacactctcggcgggttggcgtttgcgggagagccgcccttgcaggcgtatatg

SEQ ID NO: 265 - DNA, 612 bp, Clostridium scindens
  misc_feature: SEQ ID N?846787
gaccagagttctgaccagttaggcgtttccctgcgtggtaatctgcagatgaaatatgattttgatgtgcagaatggaaatattgtggtaaacgatggtcgtatgattaaccgggaagataaggatgtctgtgtgatttctcgggaacttgcagaattgaacggactgaaagtaggagacagactggagtttaataattggaaagaaagggaaacttctacggcttattctgctgaaataataggtatttatgattttgtacagaaaattactccaattatgtctggagatagttacagggcagaaaatatcatatttacagacctgcgtttccctgaaaaagcagaaggatgtgaggatgatcctctgtatcagtatgctaccttctgggtggaagatgttaatgaatatgaaactgtgagagaaagaatcaaatccgtagatatcgaatgggaaaaatatgattttcttgataataccggtatgagcgacacaatggcagagaattttaatgatttaagtaaggtaagctccctgattcttgtatttgtcatggtatcaagtgttctcattctgctttttgtattcctattttggatgaaaaaccgggta

SEQ ID NO: 266 - DNA, 468 bp, Unknown
  BMI gene
  misc_feature: SEQ ID N?847523
atggcgaaactgaaaattgtgcagtacgaggacgaaacactgcggaaggtctgcagacctgtcgaggcagtcacgccgcgggtgtgcagactgctcgacgatatgttggaaaccatgcggaacgcgaacggatgcgggctggcaggtccgcaggtcggagttttgcgccgcatcgcggtcgtggaggtcgaggaaggcaaaccgattgaactcatcaaccccaaaatcgtggcatacgcgggcgaacagcgcgaagaagaggggtgtctctctatccccgggcgttggggcgtgacgatcagaccgaagtacgtaacggtcagagccaccgatcgcaacggcaaagaattcgaggtgcagggaagcgaccttctggcgcgcgccctctgccatgagatcggccatctggacggcagactgtttatcgaccgccttgcgcccgaacagccgcaggagaagaaaaaatga

SEQ ID NO: 267 - DNA, 978 bp, Unknown
  BMI gene
  misc_feature: SEQ ID N?847584
atgaagcgtttcgttcgtccgcttctgctcctgctctgcgccgctctgctgacggggcttgtctcctgcgtcaagatcggcggcggggacgacgtgcccgagggaatgcagaacgcaacggttgcgggcgctgattaccggctctatgttcccaccacgtgggtggtgcagaactcctctccgaacgtttcgggggcttaccgtgacctttcgcggcagtcctccgtcagcggggcgaaatatccgatgaccgacgcatggcgcgcggcactggatgctttggagaccgccgggggagaggcggaaacaacaggcgatgccgcaatttccccgcgccttgcgtggttctatgagaacgaatgcctgcgccccgtgcgcgcgaccgcattggacggcaaggtgacgcctgacaaggaagcgagcggcgcggatatgctggacaagaccgacgcgggcagatggtgctattcggctctgatcggcggaaaaacctattatttcaagcagcttgtaaccgagcggaacggcgcgttttatgtgttcacgttcaccgccgaaaaggagatgtacgagcagtacgcaagcgacgtggagaagattctcaacgccttccgctttgcggacgagccgtatctgcccgatgatttcgcaaaggagaccgatgcgggcaaggacgcgcccgctggcatgaaggcttgcttcggcaaggatgtggcgtaccgcttctatgttcccgccgactgggtgatcgatcccgattccccgatctacgccgcctatgtcgaagcggatcgcacgtcggtcagtgtcgttccgtatatgccgaccgtggaacacctgagcgtggcggaatactttaccatgacccgcgagcaattggaaaaggtgtacggcgagggggcaatggttgtggacgaggatcaaacgcacaaagaaaaactcggctctcgcgaggcaacggtttacgaatacacgctc

SEQ ID NO: 268 - DNA, 621 bp, Roseburia inulinivorans
  misc_feature: SEQ ID N?848434
gacaaggcgagcggcgcaatccgagatctgaccgttactcccgtgcggcgctcggctcttgccgtcggttactttgctgcggctgcgattgtgactctgatcgttacgctgaccacggttgccgtctgcctgatctatctggcgtttatcggttggtatatgagcgttgcggatgtatttctgcttcttctggatgttctgctgcttacgctcttcggcacggcgctttcttcctgcgtcgatttcgggctgtcgacaaacgggcaggcttctgcggtcggaacgatcgtcagcgcgggctacggctttatctgcggcgcgtatatgccgatgtcaggcttcggaacgggactgcaacgggtgctgtccttcctgcccggaacttacggaacctgcctgatccgcaatcatgccatggcgggtgtcctccgcgaaatgcgggatacggcgggatttccggacgaagttctggagggaatccgcgactcgatcgactgcaatctttcgttcttcggaacgcaggtgacgcttcccgcaatgtatctgatcctcacgggcgcaacccttttgctggttggactgtacattcttctcaacgcgttgcgccgcgcgggaaaataa

SEQ ID NO: 269 - DNA, 951 bp, Coprococcus eutactus
  misc_feature: SEQ ID N?848669
atgaaagcaacaaaaaaatggctgattgcggcaagtgcgctggtagtgctcgggctgttgctctttgttctgaccatgtgctttgcgggctgggatttcaaaaagctcgaaacggaaaaatatgtgaccgaaacccatgagccaaaagatgcgtttgaaaacatccgaattcgggcggatatcgcggacattacctttttgccctccgaggacgggcgctgccgcgtggtctgctacgagcgggagggtgcggggtatgcggtctcggttaaggacggcacgctgaatatcagcgcgccccgggagcgaaaatggcatatcggagttgcctttgacagcgatcggattacggtttatctcccgcaggcggagtatgcatctcttgcaattgaaaacgaaacgggcgatatcacgcttcctggcggcttccgctttgcggatatgaacctttcggtcagtacgggtgaggtcaaaagcgaagccgaggcaggggaggtccgaatcgcgtcaagcacgggcggcatctgtgtggaaaataccgcggtcgggtcgctggaccttaccacttccaccggcaaagtgactgtgaagaacctgacctgcacgggtgacgtgaaggtcgaggtgtcggttggaaagagcagcctgaccgacgtatcgtgcaaacgcttggtctcaagggggagcactggcgatgtttccttgcacaacgtgaccgcatcggaagccttctcggttgtcagaagcacgggagatatcaccttccgcgattgcgatgcttccgaggtttacgccaaaacaagcacgggaaacattgagggcaatttcctgacggataaaatcttccttgcaaagagtgatacgggaagtatcgatgtcccgcaggcaacaacgggcggcaaatgcgagctcattaccgacacggggcatatcaaaataacggtgcgataa

SEQ ID NO: 270 - DNA, 1110 bp, Clostridium methylpentosum
  misc_feature: SEQ ID N?849537
atgaaaggactgaaaaccgtttatatctgcaccgagtgtgcctacaaaaccccgaagtggctcgggaaatgcccgaactgcggcgcgtggaattcctttgcggaggatgtggaagaagtcacgcccggggcggcgaccgcatcaaccgcgccgaaccgccgcgttgcgacgattcccacggcgcaggacaaccgcgcggtgggctttgccgacctcgagatccccgcctatatgcgccagaacacagggcttggcgagctggatcgcgtgctcggcggcgggttggttcatggctcggtcgttctgctctcgggcgagccgggcatcggaaaatccacgctcctgatgcagatctgcgacgtgttgggagaaacacggcgggtactgtacgtctccggcgaggaatcgggcggtcagctcaaactccgcgccaaacgactcggcgtgcgcggaacaaatctctttattctgaccgaaacgaacatcgaaaaaattcttgccgaaaccgaccgcgtaaagccggaagtcgtgattgtggactcgattcagaccatctatgcggcggcgctcaactccacgcccggcagtgtgacgcaggtgaaggagacggcgctctccttcatcaacaaagccaagggcgaggggatgtcggttatcatggtgggacacgtcaacaaggaaggcagcatcgcaggaccaaaggttctggagcacatggtggacgcggtgctctactttgagggcgagcggcagcagtcctaccgcatcatccgcgccatcaaaaaccgctacggttctaccaacgagatcggcgttttcgaaatgaccgatcgcgggctgatcgaagtggaaaacccctcggaaatgctgcttgcgggcagaccgcggaacatttcgggcaactgtgcggtctgcacgctggaaggcacgcgcccgctgattgccgaaattcaggcgctcgttacgcaaacctccttccccgctccgcgcagaacaaccaacggcattgattacaatcggatgtgcctcatcattgcggttctggaaaagcgactcgggctgaaattctaccagagcgacgtttatctgaacgtcatcggcggggggggg

SEQ ID NO: 271 - DNA, 564 bp, Bacteroides capillosus
  misc_feature: SEQ ID N?850244
atgctttgtaacgcgatcgcgcttgaaaacttccggaacatcgcgcgggcggaagtagcgtttgacgagggcgtgaacgtcctgtgcggggagaacgcgcagggaaaaacgaacctgttggaagcgatcgcgtatgcggcgctggggcgatcgttccgtgcgatgcgggacgaagaaatgatacggttcggcgcggacatggcggaggtgtcggtcgactttacggactcggtgagacggcagaacatcacggttcggctcgggcgtggcaagcggcgcagaatcgagcagaacagggtcaaggtcgagcgggtctcggacatcgtgggacagctccgcacggtgctgttctgtcccgagcatctgtcgctgatcaaagacggacctgcggaacggcggaactttctggacgttgcgctgtcgcagctgtaccccatgtatctgcggtcgttgcaacggtacaaccagattctcaaacagcggaatcagctgatcaggaattacgaggaagacccgcagacattccgcgatacaatcgagttttggtcggttcagctggcgcat

SEQ ID NO: 272 - DNA, 732 bp, Desulfococcus oleovorans
  misc_feature: SEQ ID N?851009
atgatgaacacaagcttcaaccaaaccgcaattgagaccgctctcggctaccgtttccgcaatcccgccctgctccgtcaggctttcacgcggtcgtcctaccgaaacgagcaccccgaatgcctcgacaacgaggtttcggaactgatcggagacagtgtactgtcgctgacggttctgtcgtggtttcgcgaaacctacatgaaggtcacggaaaacggactgctgaccgattttgacgaggggcaactgagcgccctgaagaacggtctggtcaacaaacagcaccttgccgagcggatgcggcaactgaatctggggcagtaccttctggtcagccgcggggactacgggacggggatctggcaggaaaactcggttctggaggatctgttcgaaagcgtcatcggtgcgatctatgtggacacggggtgcgatttcggcacggtttccgcgatcgtgcggcggatgcttgacatttccaaaatgcccctgcccgaagcgaaaaacattcgtctgagctggaagaacgagttgcaggaactgacccagcgaaccgacaacacactccccgtctacagcacgctctccgatgagattctccccggcaacgcccaccgcataaccgtctcctgctcggcgctcggtatcagcgtaacggcttccggcaaaaaccgcaagtttgccgaagaagccgccgcccgtatgctgtgtgagaaacggagagggtaa

SEQ ID NO: 273 - DNA, 606 bp, Alkaliphilus oremlandii
  misc_feature: SEQ ID N?851397
atggcaagacagcttgcagaaagggatgtaaaaggaaaaagagaagaggaaagaggactgacggacgaggaagtccgcgttgcaagagagaagtacggagaaaaccgactgaccaaacggaaagcaaaaccgttctggcggcagtttttgtctaacctgaacgaccccgttatccgcatcctgctcgcggcgcttgcggtgaacctgattctgctggttcatagcgcagattgggtcgaaacggcgggaatcggactggcggtctttcttgccaccctcatttccacactctcggaacgctcatcggagcgggcgtttgcaagactttcggaggagggagaccgcgcaacctgccgcgtccggcgtgcggtcggcgtgcttgagatcccgatttccgaggtcgtctgcggggatattgtcctgctgtcggcgggggaaatgatccccgcggacggcgttttgcggcacggcgcggcgagagtggaccagtccgccatgaccggggagagccgcgaggtggagaaatgcgcgtgggacggcaataattggcgcgaggagaagagcgccgagctgtcgccgtcctcgccgtatgccatgttccggggc

SEQ ID NO: 274 - DNA, 1005 bp, Unknown
  BMI gene
  misc_feature: SEQ ID N?851657
atgaaacaaatcaattccggtaaactgcgacacggtatttccgcagttgcaatcacggcggcggttgtcgttgcggtgatcctcctgaatgtcggcttcggcgtgctttcggatctcggaatgtggatgatcgacctcacgagtgagaaaatgtacacgctgacctccgagaccgtggagatgctcaacggcacgttccgacaggtcaatgagaaacgcgaggagagcggcgaggaggacgtcaaggttgacatcatcttctgtgccgaccccgacctgattaaaggcaacgaaaaaatgcggtatatctactacaccgcgcgggcgctggagaagaaattccccgaaagcatcaaggtttccaccacgaatgtctggacaaacccgtcgtcggtggaccgttaccgcaccaactcctattccgccatctaccagtccaacatcatcgtggcaagcggctcggagttccgtatcacttccgttgaaacctactatacttataattccgacacttcaggcgacgaagaaccttgggcgtacaacgccgaaaagaagttcacgcagtcgatcatcgcggttacgcgggcggaatctccgatctgcggaatcacggtgaaccacggcgaggcgcttgcaaccgaggcgggcagagccgaatacagcgaattcctgagggtcatcgaaaacgcgggctatgagattcagtatctggatctgaccaaagacacgattcccgaaaactgccgcctgcttctgacctttgacccgcagagcgacttcctcggcgaggcagacctgccggagggcacaacctccgagctgacgcagttgggcagcttccttgacaaggcgtattcctatatggtctttgtcgacgcggacacgccgctgttgcccaatctcgaagagtatctggagcagtggggcattaccttcaaccgtcagaagaacgcggacgaggactggatcggcaactggcaggtgcgttcgaacaccgcgttggat

SEQ ID NO: 275 - DNA, 468 bp, Lactobacillus delbrueckii
  misc_feature: SEQ ID N?852404
accgacacaattctctgcgccgacatcgccgacctgtttgcaatcgacctcgggcgcggggagttcggcggggcgcgcgactactacggctgccgcttcttcggggtcaactacctgaattcgggtgttctgctcctgaatctcccccgcatccgcgaaaccggactcttccgccgcgcgctcgacctctgcgcccgcaaaaaagtttttcttgccgaccagaccgccatcaaccgtctggcaaagcggaaacaggttctgccgcgccgcttcaacgaacagcaccgccgacgcgcggatacggtcgtccgtcacttttccatggcgattctctggtttccgcgtttccgaacccgcaacatcaagccatggcagatcgatgagatgcacaacacgctcggtatcaccgagtttgacgatattttagcggagtggcaggctctgaccgcccccgcacagccgaaataa

SEQ ID NO: 276 - DNA, 207 bp, Unknown
  BMI gene
  misc_feature: SEQ ID N?852468
gtggacgtgaacccgggggacagggcgaacgcgtgcggcggacagatggaaccgatacgggtcgagccggacgcaaaaaaagggtatatcatcgtccatcggtgcaccaaatgcggggagatcaaacgaaaccgtgcggcgcacgaggcgaagaaccaaccagatgatatcagactgctgatccgtctgacggcgggaaaatcataa

SEQ ID NO: 277 - DNA, 327 bp, Unknown
  BMI gene
  misc_feature: SEQ ID N?854401
atgatggatagcatgtatataggagatgattttgtgccattgacatatgaaaaaagaaatgaaggagtatcggcagagtggaaaaaatctgtgcatgttccgccacatttgcatgaagcaatagaaataatttatgtgacagatggtacagttgaattgggtgtaggacaagaattgtttcatatggagcaaggtgattttgccatagtatttccaaatgttatccatcattatcaagtgtttggtcaaggagaaaataaggctatatatttattcttggacccatcattaacacagaatttttatgaggatttacaaaagtatagc

SEQ ID NO: 278 - DNA, 642 bp, Unknown
  BMI gene
  misc_feature: SEQ ID N?854796
tatgtttattataatgagcattgcatagtatttaacgaagaacatacacctatgaagatagatagaagtgtatttgtaaagttattggattttgtttcaatgtttccacattatacaattggttctaatgcagatttaccaatagttggtggttctattttgagccatgaccatttccaaggtggagcatattcatttgctatggcgaaggcaccatatgaatataagtttaatgtgacaaaatatgaggacgtgacaattggtattgtaaaatggcctatgtcggtgattagattacaaagtgaaagcaaagaaagtatagtagaactttcaagtagaattttagattcttggagagcatataccgatcaagaggcatttatatattctgaaacagatggtgtgccacataatacaatcacaccgattgcaagaatgaatggttcgttatacgaaatggaccttgtgcttagaaataatattaccacagaggaaaaaccttggggtgtatatcatccggacgaaaaattacatcatattaaaaaagagaatataggcttaatcgaagtaatgggattagctgtattgccggcaagacttaaaaaagaaatggaagagctcgcagatgcgattatagcagga

SEQ ID NO: 279 - DNA, 717 bp, Unknown
  BMI gene
  misc_feature: SEQ ID N?855213
gcagcatttttagaggaccaggatttctttagattctttggaatatttagaaatgtatcattaagggctattccggatgttcatgttgaagatatgtggcttaatccaatattaaatagcgataatgaaagtggaaagcttgaagcaacagttaaagtttcatctattgccagcaaagatgtatcagttcatttagttatgaaggatattacagataaagtagtattggaaagcaacatagcattagaagaaaaagatggtaagcttattggttttatctcagaagatgtaacagaagtaaaagcttggaataatcacagtccttacctttataaaatagttcttgaagtaagaagtgcagatggagaaatattagaagttgttccatatagcgttggctttagaagaatagagattattgataaggttatatacttaaatggaaaaagacttgtaatagttggtgtaaacagacatgaatggaatccaaagacaggaagaaatattagtatagaagatatggtttcagatatttcttgtataaagagaaataatatcaattcagtaagaacatgtcattatcctgaccagattccttggtactatatgtgtgatgaggctggaatatatgtaatggcagagactaacttagaaagtcatggttcatggcagaagttaggagctattgagccatcttggaatgtaccgggttctgta

SEQ ID NO: 280 - DNA, 357 bp, Clostridium methylpentosum
  misc_feature: SEQ ID N?855302
atgaccctctgggaagaacttctcgagagcggaaacgacctgctctgggagaaactccgccgaaccgaaaagaagatcgtcctctacggcatgggcaacggcgcggataaaattctcgacgtctgcgcgaaaaaaagcatccccgtgcaaggcgtgttcgcaagcgacggcttccgcacgggaaaacagttccgcggcatgaccgtggaaagccgccgcgatatcctcgaccgcttcggcagggagaacaccgtcgtcctcctcgctttcgcttcctctcgtcccgaggtgctgaacctgatccgcgacgtgtcggcggaaaccgagttgtacgtccccgacgtccccgttgcgggc

SEQ ID NO: 281 - DNA, 903 bp, Clostridium phytofermentans
  misc_feature: SEQ ID N?857096
atggtagaaagaaaatattttggagaaactcaaaatggtgatattgttagtaaattcttacttgaaaataaaagtggaatgcaagtagaggtttcagatttaggagcattaatattggctatatcaattatagataaagaaggtatacaaagggatgttgctcttggatttgaaaaagtggaagactactttgatacagaaaccggaatgggagcgtatgttggaagaaatgccaatagaattaaaggtgcatgcgtaaatattgaaggtgtggattataagttggatgctaatgaaggaaacaacaatcttcatagcggatttaacaggtcacattgtcaaatgtattattcagaaaaaggtgcagatgatagtggtgaatatgttgagtttcatcgagtaagtccacatttagagcaaggctttccgggagatttagagcagactattcgatatactcttacaaagaataatgaattaatgattgattatgttatgagcagtgataaaacaactattgttaatccaacaaatcatacatacttcaatttagatggacatagtaacggaactatattggaacatgaactggaaatttattcagattcttttttggatatagataaagaaatgattccaacaggtgacattatagatgttagtggtacaccaatggattttcgtgagaagaaaaagataggtttagatattgatagcgaatatttgccattgagaactgctaacggatatgaccataattacatctttaagaatgacagaacattaaaaaaagttgcaaagctgtattcatcagaatctggcattagtatgacggtgttatcagatttatgcggattgcagatttatacaggtaacttcttaaacggacaagccggaaaagat

SEQ ID NO: 282 - DNA, 855 bp, Unknown
  BMI gene
  misc_feature: SEQ ID N?857138
atgtatacaaataacgcatatctaaacaactcaatgttagacataaaagacaaatcaaaaccattgatagtaactagtgtaggaacttatcatctttatacttgtcccaaattgccaacctggcgtcccaaagggcgaaaagacttccaattgctttatatcgctgctggtaaagcacactttcattttaacggtaaagaagaaatagttacagcaggccatatggttttataccgacctaaagaaccccaaaaatatgaatactatagtgatgaccaaacagaagcatattgggtacactttactggcggaaatgttactaatattcttcgctcttatggctttccggataataagaatatcttctattgtggttctcatattgaatatcaaggaatatttagaaatatgatatatgaacttcagatgtgtaaagagaattatgaacagatgttagaaatgtacttaaaacaaatatttattatgctccaaaggagttttttatctcaacttaaacccgataacacttatgttatcgaagaaattgataaagctacactttattttaatgaacattatagcgaaaatataagtattaacgaatatgcacaaaataatcatgttagtgttagctggttcattagaagctttaaacaatatacaggatttactccaatgcaatacattttatccaaaagattatataacgctgagatcctgttacaaaatactgattacaatgtgacagaaattgccgaaattatcggttatgacaaccctttatattttagtcgaatatttaaaaaagctaaggggatatcaccatctgaatatagaaaaaaaataaagccttaa

SEQ ID NO: 283 - DNA, 957 bp, Roseburia inulinivorans
  misc_feature: SEQ ID N?857370
atggattgtacaaataagaaagaaattagagttgtatatggagattacacacttggagtacacggagaaggatatgattatatattctcctatgcacagggcggtttggagtcaattgtaaaaaatggttatgaatggttatatcgttgcccaaagcctacattttggagagctttaactgataatgacagaggaagtaagttccatattaagagtggtaattggattgctgcagatacatttatagactgtattgatattgaagtaattacagatggcgaatcacagggaaagtcgattgcacctgataataacaaatatggttcagatgtatatgcaagtgaggtaagtgtgaaattcacttatcagacaatcattaatccgactacaacagtaattgtcacatatacagttaataataaaggaaacattacagtgaatgtgcattatgttggcgtgaagggacttccggaattgccagtgttcggcttaagatttataatgccaactttagcagataagtatatatacaatggattatccggtgaaacatatccagacagaaaaaaaggtgcaacaaagggcatatatgaagttgatgatttaagccttacaccatacattgttccacaggaatgtggcgttagaatggatgtagattgggtagaaatcgttagacatacaagtcttaacaatgcgagaaaggatatttcaccacaggtattaagacttgaaaaaacagataaagaaatagcattttcttgtttaccatatacagcattagaaatagaaaacgcaacacatcatgaagaacttccacctgctagaagaacagtgttatgtgtatacggagctgttagaggtgttggtggtattgatacatggggaagtgatgtagaagaggcttaccatatcgatgcaggaaaagatataacatattcatttaagatatgttaa

SEQ ID NO: 284 - DNA, 768 bp, Bacteroides pectinophilus
  misc_feature: SEQ ID N?858607
ttaatgggaaataatgaaatcgtagggcatagttcgagcgatatggactgggagactgcgctgaataacagtattgaaacaacagaaggtgaaaaaagtaaaaaatatacattagcttttcagagtgaaattcgtacatatcttaaatcgattaaaggtgttgatgaagcgtatgtatctataaattcaccaacggatgatggaactatttttgcagaagatcaagatgcttcggttgctgttatgttgaagctttcagatgaactatcgcaatccgcgctacaaggtatggcaaattatcttgctacagcagtgggaaataaagataccagtttagttactattgtagatacggacagtaatttattatttgatggtacaagcgctgatacattgagtggaaacgccacatcaactgcggaatatcaggaaacattgcgtgcgattatcaaaaatgatgtaaaacaggttctattaaaatcgaattacaatgaagtagagataggaacatctaatattcagtttaatttggatcaggtacagactttatatacagagtattccacaccagaaggaaaagatcagggaccatattcttcaagttatgaatattcttcaaaaggaagtagtggttctggcggaatccctggaacagattctaacgcagatgatacagattatatgcttcaaagtagtggcgataacagttctgaggttacacttaataaatatgaatatgatgtaaataaaaaagaaacgacgactgtt

SEQ ID NO: 285 - DNA, 924 bp, Unknown
  BMI gene
  misc_feature: SEQ ID N?859820
atggaggttgacatgagtaaggaatacgaaacagtcattggacttgaagtccatgtggaactggcgacaaagacaaagatattctgttcgtgcagcacagcattcggtggagcacctaatacacacacctgtccagtatgtacaggtatgccaggttctcttccagtgttgaacaaacaggttgtagaatatgcaattgcagtaggtcttgcaacaaactgtaccattacaaaaaatggaaagtttgaccgtaaaaactatttctatccagataatccacaaaactaccagatttcccagctatacttgccaatttgtcgaaacggtaaagtagagattgagacagaacaggggaaaaaggcaattgggattcatgagatccatatgaaagaagatgcaggaaagcttgtacatgatgagtggggagactgctcattagttgattttaaccgttctggtgtgccattgatagaaattgtatcagaaccagacatgcgttctgcggatgaagtaattgcctatttggaaaaacttcgtttgattattcagtatttaggagcttcagattgtaaattaaatgagggttctatgcgtgcagacgtaaacctatctgttcgagaagttggggcaacagaatttggtacaagaactgagatgaagaacctaaactctttcaaggcgattgccagagccattgaggcagaaagagaacgtcagattgatttgcttgaatctggtgaggaagtgattcaggaaacaagaagatgggatgatacaaaagaatattcttatgctatgcgttcgaaagaagatgcacaggattatcgttatttcccagacccagatttagttccaattattatcagtgatgaatggctagaggaaataaagagtcgtcaaccagaacttcgtgatgaaaagatg

SEQ ID NO: 286 - DNA, 1359 bp, Unknown
  BMI gene
  misc_feature: SEQ ID N?859950
atggaagaaaagagatacctaaaatggtataacaaggtaggctatggttcgggtgatattgcaggtaatgtggtatatgcattcctgacagcattcgtaatgatttatttaaccgatacaattgggttaaatgcaggtatagttggtacattgatagcagcatcaaagatatttgacggagtatcagatatattctttggttctatgattgatagaactaaatcaaaaatgggtaaagcaagaccatggatgttttacggggtctttggatgtgcacttacattatttggagtatttgcaattccaacaaatatgggaaagacagcacagtatgcatggttctttatcgcttacacattattaaatgcagtattctacacagcaaataatatagcatatgcatcattaacatcacttgtaacaaagaacagtaaagaacgagtagagatgggttctttcagattcatgttctcatttggtactaatatgttagtttcagcatttacatttaacgctgttgaagcacttggtggtggagcggcaggctggagagcaattgcaattatttattgtattattggtcttgtttcaaacacattatcatgtttctcggttaaggaacttccagaagaggagcttagagaaggagaagaagttaagaaagaggaaaaacttaaatttacagaaacacttaaacttcttatgtcaaataaatatttctttatgatatgtggagtattcattcttttacagttaagagcagcaatggttggtgttggtacatattatatgacatatgtgttgtttaatcagaaattgtttggtacattctcatgggcaattaatattccattgattttagtacttacaattacacctacattagtagctaaagcaggcggattatataaggtaaataagtatagctatattttcgcaacattgtgtcgtttaggaattgtgtttgcaggttacattggaagtgttcctcttatgttagtatttacagtattatcatcaattggtgaaggtccgtggcagggagattttggtgcagtaattgcaaattgttcagaacacacttaccttaagacaggaaagagaattgatggttcaatgttctcttgtacatcattcggaacaaagcttggtggtggtattggtgttgctctttctggatggttacttgatatgagcggatatgttaaccaagcaacagtgcagccagatagctgtatcagtatgttaaatgttatgtatttgtggcttccatttgtttttgatttgattgttacaattgttctttcatttatgaatattgaagaggcaaacagaaaattaaaagaaaataagcagtaa

SEQ ID NO: 287 - DNA, 852 bp, Unknown
  BMI gene
  misc_feature: SEQ ID N?859951
atgaacgcagatattaaatggttagataatcctgagatatttagaataaatcagagtgcagctcatagtgaccataattattttttgaattatgaggatatggaagagcagaatcagagattagtacagtctttaaatggacagtggagttttagttttagtaaaaatgcaatgagcagaccgaaaaagttttatgaagaagattatgacatcagtggatttgacaagattatggttccaggtcacatcgaacttgcaggttatgaccagattagatatataaatacactgtacccatgggaaggtaaaacatatagaagaggagcttatacatgcggtaataatattttcggtgcaggaatgtttagtgaagcagagtataatccggtaggatcatacgttactcgatttgatttagacgaagcactttgtggcaggcgaatttctatttgctttgaaggtgtagaacaggcaatgtatttgtggcttaatggacagtttgttggttatgcagaagatagctttacaccatctgaatttgatttaacaccatatatcagagaaaagggtaatgtattggcggttgaagttcacaagatgtgtacagcagcatttttagaggaccaggatttctttagattctttggaatatttagaaatgtatcattaagggctattccggatgttcatgttgaagatatgtggcttaatccaatattaaatagcgataatgaaagtggaaagcttgaagcaacagttaaagtttcatctattgccagcaaagatgtatcagttcatttagttatgaaggatattacagataaattagtattggaaagcaacatagcatta

SEQ ID NO: 288 - DNA, 942 bp, Eubacterium hallii
  misc_feature: SEQ ID N?860475
atgatttcatttattgagattttattgatgctggcagggcttttgcttttggtaaaaagttcccaatggtttgtagatggtgcagcaggagtagcagaagcgttgcatattccaccactgatcacagggcttacgattttagcgatgggaacaagtgctcctgagctggcagtgagctttatgagtgtatggagcaacaatgaatccgtagcagtgggagatattgtaggaagtagtattacaaatattttattaattttaggtatttgtgcattgattggaaatctgaaggtggcaaaatctacggtatgtgtggagataccatatatgttgctggcaacggtactatttggtgttatggcaattttcggaaaaggatttacccgcagagacggatgcatattgttattgctatttttggtgtatatcatttatctggtgtatcgtgccaaacaagacggaaaacagatggtgacgactacacagcaaaagaaacctatattgggtcaattgtttttggttgtagttggatttgtggttgtagttgcaagtagtgagatgattgtagagtccgctaatgttttagccaaagatatggggttaaatgatcgtttgatcggacttacgattgtggcattgggaacctctttgccagagttgcttatttgcgttacggcggtacgaagaggaaagacagaaattgcaattggaaatattgtaggaagtaatatttttaacctgttgtttgttatgggaattgtatctacggtaaagacagttacatttgagctggcctttactgctgatatgctgttcgcattaggagcaggggtgctactgtggatttttgtgttaccaaagaaacggttgaatcaggttactggaagcattttgcttttgggatatgtttcttatgtaattttccgaatggcaggacagtaa

SEQ ID NO: 289 - DNA, 1122 bp, Unknown
  BMI gene
  misc_feature: SEQ ID N?862083
atggatgagaatatctttgataaagtgcatgaagtcgatttaaaaaagacgatggaaaaatcctatattgattatgccatgtctgttattgcggcgcgtgctttgccagatgtaagagatggtttaaaacctgtacagagacgaatcttatatgcaatgatagagttgaacaacggaccggataagccacatcgtaagtgtgcccgtatcgttggtgatacaatgggtaaataccatccacacggagatagctcaatttatggtgcattggtaaatttggcacaggattggtctactcgatatccgcttgtggatggacacggaaactttggttctgtggatggagatggcgcagcagccatgcgatacacagaggctcgtttaagcaaaatttctgttgagatgttatcggacatcaataaagatacagtcgattttgcgccaaactttgatgaaacagaaaaagaaccattggtacttccatcacgttttccaaaccttttggtcaatggaacttctggtattgcagtaggaatggcgacaaacattccacctcacaatttgcgagaggtaataaatgcggttgttaagattattgacaatatggtagaggaagatcgagcaactacaattgaggaagtcatggagattattaaaggacctgatttccctacgggagcatcaattttaggtacacgcggaattgaacatgcatatcgtactggacgaggaaaaataaaagttcgtgcagttacagatattgagacgatgccaaatggaaagagtagaattattgtatctgaattaccatttatggtaaataaggcgcgtttaattgaaaagattgcagagttgcataaaacgaaaaaaattgatggaattacagagcttcgtgacgaatctgaccgcgatggtatgcgaattgtaattgaattgcgtcgtgatgtaaatgcaaacgtattgttaaatcaattatataaacatacacagttacaggatacgtttggcgttattatgctggcattagtaaataacgaaccaaagataatgagccttttggaaatgcttgagtattatttaaagcatcaggaggaagttgtaacaagaagaacacaatatgac

SEQ ID NO: 290 - DNA, 1260 bp, Unknown
  BMI gene
  misc_feature: SEQ ID N?865365
aatccatatgttacctatgacaacaattttattgagtcagaatggtgggcattaaagaccatctgggacaagaagttattatacaagggacacaaaatcgtgccttactgtccacgttgtggaacacctttgtcttctcatgaggtagcacagggatataaggatgtaaaggaaaagtctgctattgcaaaatttaagatagtgggaacggaagatgaatatattttggcatggaccacaacaccttggacacttccttccaatgtggctctttgtgtaaacccagacgagacatatgtaaaggtaaaggtgcaggtaaatggaaagaatgatgtagtaaaagagggcgaagaagatactgccgttggaacggaatactacatcatggcagaggcacttttggattctgtaattgatggagtatacgagattgtagaaaaatatgttggtaaagatttagagcataaacagtatgtgccattatttgattatgcctttaacaatccagacggtacggtaggagatccaggtgaccgcactatggtaaagaataagaaagcattttatgtggtatgcgattcttatgttacattgaccgatggtactggagttgttcatattgcacccgcatttggtgaagacgatgccaaagtaggaagaaaatatgaccttccatttgtacagttggtagatgataagggacagatgaagccagaagtgacagatatggcaggtgtattctgtaaagatgcagacaagctggtattcaaatcattaggcgagaaaaagttattgtttaaggcattaaagtttgaacatagctatccattctgctggagatgtgataccccattgatttactatgcaagagaatcctggtttatcaaaatgacagaagtaaaggatgatctgattgccaataataacaccattaactggatcccagccactattggtaagggacgctttggtgactggctggaaaatgtacaggactggggggtaagccgtaaccgttactggggaactccattaaatatctgggagtgtgagtgcggttgtcagcatgccatcggaagcattgaagaattaaagtctatgtctgataattgtccggatgatattgaattgcatcgtccatatattgatgcggtaaccattaagtgtccagactgtgggaaagaaatgcaccgtgtaccagaagtaattgactgttggttcgattctggttctatgccatttgcacagcaccattatcca

SEQ ID NO: 291 - DNA, 723 bp, Clostridium kluyveri
  misc_feature: SEQ ID N?865485
atgaaaaagtctttggaaattgtatggaagtatttgccggctttgttggaatctttgccgacaacactttatatgttagtaatatctgttttcattgctgcaatattaggcttttttctcgcatgggcaaagattggaaaaaatccgttgttaaaaggactatccagtgtttttatatcttttatgcgaggaacgccgatgatggtacagcttttgttaatttttatatggataccccttatttgcaatgacaatggcataagtacgaatacatgggatcccatcatttatgctttaatttctttttccttaaatatggcagcgttttttgcagaaatctttcgctccgcatatattgctttggattataagcagattgaagcagcacagagtttgggaatgggaccgttacagacttttcgaagagttatattgccgcagggagcggccagtgccttgcctaatcttacaaatatgtctttggaacttatgaaaaatacttctattgcagcggtaattggagtctatgatattcttggaaaggcacagcaattggtaaaaaacaattatggagttggacagttggaactgtacataacagtaggagtgattttctggattatgggattacttattttatttgtttccaatttggtaacgagaaggctcaataaaggaaatcccgcaatgcaaacaaagaaactttttgcagcaaaaggatag

SEQ ID NO: 292 - DNA, 1200 bp, Clostridium phytofermentans
  misc_feature: SEQ ID N?865516
gtgaaaggagtttctatgtattttcatagttattgtgcagcaatacaagggattgatgcacatatcatttctgtggaagtcgatgtttgtgatggacttcccatgttttctttagttggtctgttaagttcagagacaagagaggccaaagaccgtgttcgtatttctgtacgaaattccggatatcgtatcccaacgaaacatataacagttaatttatcccctgcggatattagaaaagaaggtacggcatttgattttgctattgcggtagcgttattagctgcctttggaagaataccacaagaatgtttggaaaatgcaatgtttattggagaattaagtctaaatggggaaattaagagggtaaatggtgtacttcctatggtatatgcagcgaaaaagaatcgaatgaaatattgttttgtagccagagaaaatgtggcagaggctgcaatggtggaaggaattaaagtaaagggggtaaaaaatttaaaagaagtggtggaatattttacattagaccgaaaaatagcaactacaacagtaacagcatttgcagagcagatagaagaaagaatggaagatttttcagaggtttccgggcaggaaatggtgaagcgagcattagaaattggggtttgtggcatgcataatgtattgatggtaggtcctcctggtgcgggaaagactatgttagcaaagaggattccttctattatgcctgaactgacatttgaggagagtttggaaatatccaaaatttatagtatttctggtttgttagatgaaaattacgcttatattaaaaaaagaccttttcggagtccacatcattccgtaacaccgacttcattgattggaggagggtatcatgtaaagcctggagaagtgtgtttggcagatggtggtgtgctgtttttagatgaacttccagagttttccagtaatacgattgatatgttgcgacaaccattagaggaacacaaggttgttatttctcgaatgcagggaagctatactttcccggcaaaatttatgttggttgcagctatgaatccttgtaaatgtggtttttatccagaccgaaatcgttgtcgttgttcggaacggcaagtgagagggtatctaaataaaattagcagaccattgttggatcgaattgatttgagtgtagaggctaaggaagagaactattag

SEQ ID NO: 293 - DNA, 846 bp, Eubacterium ventriosum
  misc_feature: SEQ ID N?866708
atgattcaaatcgcaacaactgtaaatgaagtaagaaaacaagtaaaagcatggaaaaaggaaggtttatccgttgcattagtacctacgatgggatatttgcacgaaggacatcaaagtcttattaagcgtgccgtagaagaaaatgacagagtcgttgtcagcatttttgtaaacccaatgcagtttggtccaacggaagatttagacagctatccaagagatttagagaaagatagcgctctttgcgaagctactggtgcaaacttaattttccatccagaaccagaagaaatgtacacagacggcttctgctcttatgtagatatgtctgttttgacagaagaattatgtggattaagtcgcccagtacattttcgtggtgtctgtacggtagtatctaaactattccatatcgtgacacctgaccgcgcttactttggtcaaaaggatgcacagcagcttgccattatcaaacgtatggtcttggatttgaacatggatattgaagtaatcggttgtccaattgttcgtgaagccgacggattagcgaaaagctctagaaatacctacctttctgcggaagaaagaaaagcagctctaattcttagcaaaacaatcaaacttggcgaaaaaatggtagcagatggcgaaaaagatgccgctactattttagatgctatgaagaaaaatattgaaacagaacctcttgcaaaaattgattatgtgaaaattgtagatgcactaaccatgcagcaaatacctaccattgaccgtccaattttatgtgctatggcagtttatattggaaagacaagattgattgataacttcatgtatgaataa

SEQ ID NO: 294 - DNA, 870 bp, Unknown
  BMI gene
  misc_feature: SEQ ID N?868899
atgaacaaattgatttctgaattggtcaaatatggaatccaaagagggttaatagacacagaggacaaggtctttgtaatcaaccgactgttagaagtgtttggattaaatagctttgaatggtcagatgaggaagtaagagaaattcattgtatattgtcagatatgccagattatgcagtggaaaacggaatcattgaggaagatacaatcacaaacagagatttatttgatacaaaagtgatgggaattataacaccaatgccatcaagcgtaagaagtaagtttaaggaattatataaaaagtctccaaagcttgcaacagatttttattacagatttagccaggacactaattatatccgtgctgacagaattgtaagagatgaaaaatggaaagcagatacagaatatggcgagatagatattacaattaatttatcaaagccagagaaagacccaagagatattgcaaaggcagcaagccagagtaagagtgaatatcctaagtgttttttatgcaaagaaaatgagggatatgcaggaacattatctcatccagctcgtcagaaccacagaattattccaataaagttaaatgagcagaactattttctgcagtattctccttatgtttattttaatgagcattgcatagtatttaacgaagaacatacacctatgaagatagatagaagtgtatttgtaaagttattggattttgtttcaatgtttccacattatacaattggctctaatgcagatttaccaatagttggtggttctattttgagccatgaccatttccagggtggagcatatacatttgctatggcgaaggcaccatatgaatataagtttaatgtgaca

SEQ ID NO: 295 - DNA, 339 bp, Unknown
  BMI gene
  misc_feature: SEQ ID N?868900
gatggaacatgtgtaagagattatattcatgtgaacgatttagcacaggcacatattcttgctatggaatatcttgctaaaggtggagaaagcgatgtgtttaacttaggtaatggtgtaggtttcactgttaaagaagtaattgaaacagcaagagaagtaacaaagcaaccaattccagcaaaggaagaacaaagaagagcaggagacccatcggtacttattgcttcaagcgataaagcaaagaacgtacttggttggaaaccacaatttgcagatttaagtgtaatcattaagactgcgtgggaatggcatgtaaatcatccaagcggatactag

SEQ ID NO: 296 - DNA, 492 bp, Unknown
  BMI gene
  misc_feature: SEQ ID N?868901
gtgattgataatttattaacaggatttaaggaagctgttcatccacaggcaaagttctatgagggtgacatcagagataaggcttttttagatgatgtatttagcaaagaaaagattgatggaattattcattttgcagcaagctcacaggttggagaaagtatggttgacccattgaagtactataataacaatttgtgcggtacagaagtattactagagagtatggtacagcatggaattgataaaatcgtattttcatcaacagcagcaacttatggagaaccggaaagtattccaattatggaatcagacagaacagagccaacgaactgttatggtgagacaaagttatctatggaaaagatgtttaaatggacatctaaagcacatgatttaagatatgtatcactcagatattttaacgcatgtggagcacatccaaatggacttattggtgaagcacataatccggaaacacatttgattcca

SEQ ID NO: 297 - DNA, 1473 bp, Clostridium phytofermentans
  misc_feature: SEQ ID N?869383
atgaatttaagtgaaggcgcgtctagtgtgacaagccttttatcaaatcccgttcaatttatgaatcagatgactgaagatatgtatcaggttatggtggaggattttgataaaaatgcagatcatttggataaaaaggactgcttgaaaagatataatgagcagttatcatggaagtattcttttttgcttgtaaaaaaaggagaaaagtatagttatattgggaagctggattcttttgtgaaaattaaaaatcggattcccacggaagaacagtggaaaatgttgtctgacagtggctcctatgtaggcggggaaaatgcattcatcattaaacaacatgcagtaacctttgaagatggaagtacggggcatttttatgtagttactatgattaatggattgctgcctgcggtgcgaactgtggcattacagtgtgtattatccttctttgttattatactgtttaccgcttcgttgcttatgctgtggatttatggaggaattgtacgacctattaatgtattgaaaaaagcaacccataaaatgagggatggagaattggatttttccattgaagcaaggggaaaagatgagattggtatgctctgtcaggattttgaggaaatgcgtgtgcgtttgaaggcgtccacagagatgcgtttacggtatgaaaaggaaatgcgagagttagttagtaacatttctcacgatttaaagacgcctcttactgcaattgaaggatatacagaaggtattttagatggcgtggcatctacgcctgaaaaacaggaaaaatatttgcgaattatttataaaaaagcaaaagaaatggcgatgttggtagatgaactatccatgagttctaaaatagaaaatggaatagtgccatataatattcggtatgtaaatataaatgattactttaaagattgtgtggaggaaatcgaaattgatttgggcttgcagggcatttgtgtaagttaccagaatgaggtggaaaaagatgtgcgtgttgctatggacccagaacaggtaaagcgagttataaacaacattgtcggaaattcggttaaatatctgggggaagagcaaggcacgatttgtatttacctgttggatgaacagaaattaccacaaaatattgactatgaggaacaggcaaaagaaaaaaagaaacaggagaaagagacagaaaagaagcagacgaaagagagaacaggaaccaagagcagaaaaaatcaacaagagaaagtggagaaaaaacagccagcgtttgtgagaatagaaattcgagacaatggttcgggaattgcagaggaggcacttccacatatatttgaaagattttacagagcagatgcatccagacattccagtactggcggcagtggtttaggacttgcgatagcggcaaaaattatacaggatcagggaggtcgtatctgggcagagagcagagttggaaaaggc

SEQ ID NO: 298 - DNA, 921 bp, Unknown
  BMI gene
  misc_feature: SEQ ID N?870033
atgcaagaaataggattacagacaaaagattattattttgatttgccacaggaacagattgcacaggaccctttggaagatcgttccagttctcggttgttggtgttagataaagaaacaggagcgcgggagcatcatatctttaaagacatcaaaagttatttaaagccaggagactgccttgtattgaacaatacgaaggtaattcctgcaagattgataggagaaaaagagggaactggtgcaaaggtagaaattttattactaaagcgtaaggaaaatgatatttgggaaacattggtaaaacctgggaaaaaggctcgtccaggagcaaagattatattcggaggaggattattgtcctgcgaaattttatccattgaagaagaaggaaatcgcttgatacaattttcttatgatggaatttttgaagaaattttagatcaacttggacaaatgccattgccaccatatattacacatcagttacaggataaaaatcgttatcagactgtttatgcgaaatatgaaggttctgcggcggcgcctacagcagggcttcattttacaaaggaattattgaaagaaatagaggaaatgggtgtgcgtctggcttatgtgactttgcatgtaggtctgggaacgtttcgaccggtaaaagtagacaatgtgaaggaacatcatatgcattctgaattttatcaggtggatgcgcaggctgcagagaagattaaccagacaaaaaaagaaggcggaaggattatttgtgtaggaacgaccagttgccgtacaattgaatctgcggcagaggaagatggaacgatgaagccttgtagcggggagacagacatttttatttatccaggctataaatttaaagtgttggattgtctgattacgaattttcatttgccagagtct

SEQ ID NO: 299 - DNA, 1974 bp, Streptomyces griseus
  misc_feature: SEQ ID N?870115
cgcggtgactttaaaggtttaattgaaaaattagattacattaaagcacttggattttctgctgtatggattaccccagtagtagaaaatgccagtggattggattatcatggatatcatgctatgaattttcagaaagtagatgaacgttatctgtctgatggtgtaagttatcagacattgatcaacgaagtacataaacgtggtatgaagattgtgcaggacgttgtatttaaccatactggaaactttggagagacaaaccttgcaccaatgttcgaaaaggatagtacagtagaaggtggattggaaaccgtaaattgtatgaagaaatgcgaaaattctattttgccggataactattatgattctagcaaatttaaaaatagcaatgagtttggtacgtggcagtatcagaccagactggcattgatgaaagatacaaaagatccgattcatgaaggagttcgtaacgatccaaagacattttaccatcgttatgacaacagctttagttgggatttctataccgttcagcttggacagatggcaggagactgtgtagatttgaatacagaaaatccaattgtatcgaaatatattacggatagttatacaaagtacatcaatatgggaatcgatgcgttccgtatcgataccgtaaaacatatttcaagactgacatttaacaatgccattcttcctgctttacgagcagcaggaggaaaagacttctatatgtttggagaagtttgtacaaaatccagtcagatatggtatcgaggagagactcctgcattgtcaggtccattctatacatggaaagaaaacaaagactataagtggtcttattatgatgaaagcgtagagtctgcatatgatgcgtatgcggcaacacctcctgaaaaggtatattctgactttagcaatgagttggcttatgataactggagattagaatctgaagcagatttaccacacggtatcaatatggcatcaacagagcagaattataatgataatgccaatgacgtaggaggaaagaacgtaaaagaaggcggaacagcgcaggctgcacagccagtcagtgataacgcatttttaaatggaaatgagtatcataaaccagatacagagcaagcatcagacttaaatgtaatagactttacgatgcattggaacttttcaactgcgaaaaaggcatttgaaagtacaacaggaaattatgactataagacaaatactgtgaaaaataagaaagatacagcaggtggagattatacctataacgattctacttggaatgtaacctatgtagattctcatgattatgcaccggatggaacacaatctggttttacaagacgttacaacgagggagaagaggcttgggcagaaaacttatgtttactattctcattccgtggtattccatgtatttattatggatctgaagtagaattccaggctggtaaggtcattgatgatggaccaaatgtaccactttgtgaaactggtcgtgcttattttggtgattatctggagggtgatgttactgcatctgattttggtgtgtatacagcagaggcaggaagtaaggtagaggaaacattagcagcaccattatcacagcagcttattcgtctaaatacaatccgccgtaagattcctgccttacaaaaaggacagtattcattggctgatattgattactcagatattgcatttaagagaagatacacagacagcaagaccgatagttttgtctgtgtaacaattacaggaaaggcaacttttaacaatattccaaacggaacttatgtggatgctattactggaacagaaacaaaagtaaccaatggaacactttccattgatgcaccaggaaaaggaaatatgcgtgtctatgttttggatacagacaaaacaccagctcctggaaaaattggaaaggatacaacttacttaaaataa

SEQ ID NO: 300 - DNA, 1284 bp, Eubacterium ventriosum
  misc_feature: SEQ ID N?870661
atgttagacatcaagttattgagaagtgattttgaaggtgtagaaaaagcattatctacaagaaatgaggaatttgatttaagcaaatttaaggatttggatgccaagagaagagcattacttggtgaagtagaagctttaaagagtgaacaaaacaaagcatcaaagcaagttcctattatgaaaaaagaaggaaaggatacaactgctttatttgaagaaatgaaacagttatcagataagattaaagatttagatgcacaggttcgtactgtagatgaagaattagatgcatggatgcttacaattccaaatatccctcatccatctgttccagcaggaaaaagcgatgaagaaaatgtagagatccgtaagtttggtgagccaacaaaatttgattttgaagcaaaggcacattgggatattggtaaagatttagacattttagatcctgaaatgggtgcaaagacaagtggtgctcgttttacattttataaaggattaggtgcaaagcttgagagagccattatgaacttcttccttgatgtacatgaaaaacagggttatgaagaagtattccctccttttatggtaagtagagcaagtatgacaggtacaggtcagttaccaaaatttgaagaagatgcatataaggtaacaggtgatggaaaggaatatttccttgttcctactgcagaagtacctgtaacaaatatgtatcgtgagacaattttagatggaacaaaacttccaatcaagcattgtgcatatacagcatgtttccgtgctgaagctggttgtgcaggtcgtgatacaagaggattgattcgtcagcatcagttcaacaaggttgaattagttgaattttgtaagccagaggattcttataatgaattagagcgtttgacaggagacgcagaagaagtattacagattcttggtttaccatatcgtgtagtaaagatttgtatgggagacttaggatttaccgcagcaatgaagtatgatattgaggtatggatgccatcttatggtagatatgtagagatttcaagttgctcaaactttgaagcattccaggcaagacgtgcaaatatcaagtacaaagatagtgcaaaggataaggcacaattcattcatactttaaatggtagtggagtagctattggtagaacaaccgcagcaatcttggaaaattatcagcaggcagatggaactgttgtaattccagaagcacttcgtaaatacatgaatggtcgcgaggtaattgctggaagagactaa

SEQ ID NO: 301 - DNA, 690 bp, Clostridium phytofermentans
  misc_feature: SEQ ID N?870671
atgattaatcaagaaaagatgggagaatttgaaaatatgattgggtatcattttcaaaatcgaaattatttacgtcaggcattatcacatagttcttatgcgaatgaaatgcgtctgagtaaattagcaaataatgagcgattggagtttttaggagatgcggttctggaattaatgtccagtgagtatatatttcgtactaatgagcagatgcatgaaggagagatgacaaaacttcgtgccagtcttgtatgcgagcctacattggctatgtgtgccagagaaataaacttaggtgattatattttattgggaaaaggagagattgcaacagggggagcaaacagagattcgattctttctgatgcttttgaggcagtgattggtgcaatttatttagacggtggttttactagtgcaaaagagttcattatgaaatatgtgttagacgatattgatagcaaaaagctcttttttgatagtaagactatcttgcaggaaattgtgcaggcagattataaagaaccgttgcaatataagttactaggggagtcaggacctgatcatgacaaagtttttacagttgctgcaattgtagatggaaaagaacttagtcaaggtactggaaagacaaaaaaagctgcggaacaggcggctgcatatcaggcaattttgaagcttactgattag

SEQ ID NO: 302 - DNA, 1398 bp, Clostridium phytofermentans
  misc_feature: SEQ ID N?870965
gtatatggttatatgaattctggcgactatgagggttgtgtgggaattttatggtacaaatattattcagcagacaagcgaatagaagaacaggtatttattccaatggaaaccacatatcagattatgaaagaaaatttagattccttttcttatgtcagcaatggagacattttctacttttccattgaaaatgtgatttatgcgtatgatgttgtttctaagcaattaaaagtaattgcaaaagatgtggcagacggagattattgctatgtagagtccgtaggactgctggcatggcaaagcaattctgatgatagtaattcgaccgagattattttgatggatttggatacaaagaaaatgacagaattaaaggcaggaaaaggggaacggatcattctagtaggaagcattgatgaaaatgttgtatatggtctggcaaaggcaagtgcggtatccgaaaaagaagacggttccaaatttacaccgatgtataaagtgtgcatcgtgaataaagagggaaaagtattaaaggaatatcaggaacaaggcatttatgtaaagagtgcgacagtggaagataatgtagtaagattgcagcgagtaaaagaagtaggaaatggctataagcagattaagtctgacagtatccaaaatcaggaagcaagccagacaatggatatgggaattacaagccgtgttacagaccttaatttaagagaatactatatttatctaaaagcaggttttacaatggcagaaaagcctggcgtatcggatgtaaagacgacaatgattggtgaaaataaaattgtacgtctggatggaaatgaaaccagtatttccagatactacgtgtatgcggaaggtgttattattggtgcatacgcgagccctgcaaaagctattacagaagcggaaaatgctatgggggtggttgtaaatgaggataaccagattgtgtatgagcgagcaggaaaatatacgaataatcagatcggaaatgtggaaaacgtttctactggaaatggagtaaatagtaaaggtgcctgccttgctatgctattgaagtttaatcatgtttctgcggatgcgaaagaattatccaacagtaagaagtccgcatacagtttacttacaagtaaattgggagaacaggtcaatgtagtaaatctaaagggatgtacattagatgaggtattgtattttgtcagcggtaatcgccctgtaatcgccatgacaggcagtgataaaatggtattattaactgcttatacggaaaacagtgtaacatttgtaaatccagatactggtaaggcagaaacaaagagcatttccgcagcagaagcaatgttccatgcagcaggcaactcatttatcagttatgtccgataa

SEQ ID NO: 303 - DNA, 1119 bp, Unknown
  BMI gene
  misc_feature: SEQ ID N?871372
tatacaatactggcagttactttgattcgaacaattgtatggagcataagtggacaattattaggtggcgacagtgtttccttgattagtatcgttatacatatcgaaattataattgtactgcatagaatttccaagctttcaaatgttttttctggcgatatgcttggaacggcagaggatgaacgcaacttacaggcaagtatgctaaacgaagttctacagatttctaaggatgtacaacttgctgtttctaatacaaatacactaatcgaacatttaaaaaatgatgccagtatggtgcatgactcgattgaaacgatttctggtcagacacagaataatgtagatagcgtaaaggaacaaagccaaatgacaaagcgcatcaatagtgacattgaagatacctctgaaaatgccaaaattatggtagaggcagccaccatgtcatcaaaattgttggaagaaaatatgaccgtcatcgattcaatccgaaaagatgccgattctatcaatgagaccaacagtcgcgtagctgaatcgatggaagatttgcagaaaaaggcgaaggaagtccaacagataacagaagttattttctctatttccagccaaacaaatcttcttgcattaaatgcttctattgagagtgcaagagctggagaagcaggaaaaggctttgccgttgttgccgatcaaatacgaaatctggaagaggaaaccagacaatccacagaacagattgctaacattgtagaagaattaaatgcaaatgcacagatggcaaccgacattgtacagtgttctattcatgcaatggaaacacaaaatgaaaaggttgcgaatgcctctgatggatttactgaagtgcaaaatcacattaacacattgacgcagcgtgtggaaaatattaatgaaaagattgctaatttggtttattccaataatacaattattgaaaatatcaaccagttatcagacagtagtgcatctgtttctgaaagtgcaaaagaggttgaagtacgaagtctccaaaaccaaacagaagcggaacaagccaaagaattacttagacaaatgcagacattggtacaacaattagaaaaataccaaaaataa

SEQ ID NO: 304 - DNA, 1263 bp, Unknown
  BMI gene
  misc_feature: SEQ ID N?871460
atgaagaaacagatgatttgtagctttttggcaatcagtttagcgggcatgatgtgtgccggttgtagtcagagtacggaaaagaaggacttgaaattatcaagtttagacgaaaagaaaggcgatgataaaaatgtagaactgactgtctggggcgcgaaggaagatcaggaactattaaaggaaattgtggacagctttcaggaaaaatacaaaggtgaagcaaagtttaatattaccatttctgctcaaagtgaagcggattgtaaagatgcagcacttggagatgtttccgagtgtgcagatgtatttacctttgcagacgatcagttgacggcattggcggcagcaggcgttttaaagcctgtcaaggatgcggaaaagattaaaaaagattccttagatggagcagtacaggcggcttctattaatgatacattgtatgcatatccgttgaccgcagataatggatattttatgtattataataagagctatttttctgacagtgatttgcagagtctagataaaatgcttgaaaaggcgtctgcaaagggaaagaaagtaacgatggattggagttctggttggtatttatattccttctttgctaatactggtttaaaagtagggttaaatgatgatggaattacaaattattgtacatggaatggaaaaaaaggtaatgttaagggtgtagatgttgctgagagtatgatgaagattgccagatcaaaaggtttcaaagagggaaatgatgacgtattagccaacggtgcaaaagatggaagtgtgattgcaggtgttagtggtgtatggcttgcggatcgtttgaaagaagcttggggaagcaattatgcagctacaaaacttccaacgtatactgtggcaggcaaacaggtacagttaggatcttatgtaggatataagatggttggtgtaaattcaaattccaaacaggtaagttgggctacaaaattagcagagtggattacaagtcgggaaaatcaggaacttcgttttgaaaagcgtggacagggtccagccaatgccaaagcatcggaaacagatgccgtcaaacaaaatgtggcaatcaaggcactgttagagcagtcggattatggtagtttacagcgtattggtggaaaatactgggaacctgtggcagagtttggtgcaaagatggcaacgggaagtacaggggagttctctgtacagaaaactatggatgagcttgttaagaatattacagcgactgaatag

SEQ ID NO: 305 - DNA, 1848 bp, Desulfitobacterium hafniense
  misc_feature: SEQ ID N?871577
gtattagatgctgcaaggaaagcaggagtgttagtggaaagtccttgtggtggaaatggaacctgcggaaaatgtcgtgtgaaggttttggttggcgaggtgaatgcgattacggaggaagaaaagcatttctttacagagcaggaattacaggatgggtggaggcttgcctgtaagcttgttccaaagcattttcgcagttgtgaggtggaagtaccgaatataaatttacaaatggattctgagaaggaagcgcatttgttgtatgaaagtgaattaaagaaatatgagaaaaagataaaggaatgtttgcaggaagaagaaaaggacgggaatagagaaaaggaaaccatgcatggtggcagcagggagagtaaagcagattgtgtagaaaaatgtgcaagcacatttggcattgtagtagatattgggacgacaaatatggaatttcttttgtgggagttagaaaccaaacgttgtgttggtcgtaaaatagctgaaaatcctttgaaaatatatggtgcagatgtggtggcacgcatgacctatgcattgaaagataaggaaaatttcaaagagagttgttcgctgcttagaaataccattgcaacgttaatggaagaattgctgcaaacatatttagaacagtatccttgtgaggaaagtcgtgagatagaaaatgagaatgaaaatatgggtggaggcacacatttttctgagcagatggttgaaaatgtgttattacaaagcatgaaagagaaggtatctacggtttccgtggttggaaatgctgccatgatgcattttttagcagaggtgagtccagaaagtcttacgagggcaccttataaaacaaagtataaggatagtgtaagtctttctggaacgttgtttggactgatccatgccagtgtgcgattgtttcctaatattgaaggttttgttggagcagatacggttggagtattggcttatttaaagcagtgcagagaagaaaaagaggacatgtcaaaggtagatgataaagcagcagttgtcataaaaacactcaaaaacagcaaggatatttcaaaatgggatcgtgtgttgatgattgatattggaaccaatggagagttagtattacaaaaggatggcaggttatatgcagcttctacggcagcaggtccagcatttgaaggagctaccatttcttgtggtatgcgaggagaagtgggtgctatccgtggaatgcaggtaaaagagaaaatagaacttgatgtgattggagaggtggcaccaaggggaatctgtggctctggtttaatttctgttgtggcagagctggtgaattttggaataatagatgaaacgggatatttattaaatagaaacgaagctataaagcaaggatgtccaaaggttcttgtggattgtttggaaataaggggaagagaaactgtttttgctatttctgatacggtactccttacacaacaggatattcgtgagttacagttggcaaaaggggcaatttctgcgggaattacaatgttacttcaggcttgtaagatgaatgtttgtgatttgcgtgggattgtgttagcaggtgcgtttgggacacatttacaagtagatgcagcacaacggataggattattgcctgatatggaaaagaaaaaaatcgttcctattggcaatgctgcgttattgggggctggggttgcattattttattcagaagaaaagtggagagcattaaatacccttgctcgtaaggtgcagcatatttctttggcagaaatggaaggctttcaggaggtgtatctggaggctatggggtttgctaaagtggaggaggaacgataa

SEQ ID NO: 306 - DNA, 666 bp, Unknown
  BMI gene
  misc_feature: SEQ ID N?872731
catatggagcaaggtgattttgccatagtatttccaaatgttatccatcattatcaagtgtttggtcaaggagaaaataaggctatatatttattcttggacccatcattaacacagaatttttatgaggatttacaaaagtatagcccggcatatccgataattgataaggaacatgtgcatatggacattgtaaattcaataaaagcactggcaaataatacagagggtaatccaatgataattcaagcatatgtacatattatgttagcccatgtattttctgatatggaaatgaccgataaagatttggttggaggcgacgatataatatactgtgcggttgaatatattgcaaagaatttcagggaagatatacatcttgaaaaaatggcgaatgatttagcagttagcaaatatgtgctatctcgaatgttcgcaaagacatttcattgtaactttaagaaatacttaaatggaataagacttaattatgcgatttcagctttggagaacactaatgagtctataactaatataagtcttgatgcaggctttgaaagtcagcgtacatttaaccgtgtatttaaggatagatacaagatgacaccaagggaatatcgaaacagaatgcatagtaagagaagtaaggagagtgttgtctaa

SEQ ID NO: 307 - DNA, 1338 bp, Unknown
  BMI gene
  misc_feature: SEQ ID N?874171
atgaatatcgaacgaattatgtcctctttagaggcaaagcatcccggcgagtctgaatatcttcaagccgtaaaggaagtacttctttccatcgaagatatctataaccagcatccagagttcgagaaagctaaaatcatagaacgcttggttgaacccgaccgtatctttacgttccgtgttacttgggtggacgacaaaggtgatgtacaaaccaaccttggctatcgtgtgcaattcaacaatgccattggcccgtacaaaggcggcattcgtttccatgcatctgtaaatctttctatcttgaagttcttaggatttgaacagacgtttaagaatgcactgaccactctgcctatgggtggtggtaaaggtggttccgacttctctccacgtggcaagagcgatggtgaaattatgagattctgccaggctttcatgttggaattgtggcgtcatcttggtccggatatggatgtgccggccggtgatatcggggtaggtggccgtgaagtaggctatatgttcggtatgtataagaagttgacgcgtgagtttaccggtacatttaccggaaaaggtttggaattcggtggttctctgattcgtcctgaagctacaggtttcggcggattgtacttcgtgaaccagatgttagaaactaaaggcattgatatcaaaggtaagaccgtcgctatttccggtttcggaaatgtggcttggggtgctgctaccaaagcaaccgaattgggtgcaaaagtagttactatttccggaccggacgggtatatttatgatccgaatggtatcagtggcgacaagatagattatatgcttgaactccgtgcatcgggtaatgatattgtggctccgtatgcagacgaattccccggttctacatttattgccggtaaacgtccttgggaagtgaaagctgatattgcactgccttgtgctacgcaaaatgaactgaatggtgatgatgcccgtcagttgattgaaaataaagtgatgtgtgtaggagaaatctcaaatatgggctgtacgccggaagcaatcgatttgttcattgaacataagattatgtatgctccgggtaaagctgtcaatgccggtggtgttgctacttccggattggaaatgtcacagaacgctatgcatctcagttggagtgctgccgaagtggacgagaaactgcacgcaattatgcacggcattcatgcacaatgcgtaaaatatgggacagaacctgacggttacatcaactacgtgaagggagctaatattgcaggcttcatgaaggtggctcacgctatgatgggtcagggaattatttaa

SEQ ID NO: 308 - DNA, 1140 bp, Unknown
  BMI gene
  misc_feature: SEQ ID N?874355
atgaaaaacagttttctacttgcaggaattgccgcactgatgttatctgcgtgcaataacaagccagctcaggagttgactttgtccggtctgaatccggtgaattttcaaacagaagtgaacaatgccctaacagatctttccaccttcaagaacaagtcgggcatggaagtatgcatcactaacttcggtggtcgtatagtctccgttatggttcctgataaaaacgggaatatgcaggacgttgttctgggtttcgacagcattgccgactatgtaaacatcccaagtgacttcggcgcttccatcggtcgttatgcaaaccgcatcaaccagggaagaatcgtactggacggagacactatccaattaccgcaaaacaacttcggacattgcttgcatggcggtcctaaaggctggcaataccaagtatatgaagccaacccgattgacgaaactaccttggaactgacccgtatttcaccggacggagatgaaaacttccccggtaacgtaacagctaaagttcttttcaaactgactgatgacaacgctatagatataaagtatagcgctactacagataagaagacagtcatcaacatgaccaaccactcttacttcaacttatccggcaatccttcaaaagttgcaacagatcatattttatatgtaaatgcagacaactacactccagtggatagtactttcatgaccactggagaaattgcaacagtgaaagataccccgatggactttactactcctaaaacaataggacaagacatcacaaacttcgatttcgttcagttgaaaaacggaaatggctatgaccacaactgggtactgaatacaaatggagacattgctcaattagcagcaaaactgacttcacctgaaagcggtattactctggaagtatataccaacgaaccgggtatacaagtttataccggtaacttccttgatggaactgtaacaggtaaaaaaggcatcacttacaaccaacgtgcttccgtatgcttggaaacacaacactatcccgacagtcctaataagccggaatggcccagcgtggtattggaaccgggacagacatacaacagcgaatgtattttcaaattctcagtagagaaataa

SEQ ID NO: 309 - DNA, 582 bp, Bacteroides capillosus
  misc_feature: SEQ ID N?876282
gagagggctgccaagcgcccgcagacgctcatggatattgcgaccatcggcacaaagacgctcaaagcccgcgggctgctccccgagctcgacgagagcgaggagatcaacgcctcctccagccatgtgcccgccatggtgaacggcaaggagcaggactggcttttgatgttcaagaatgaaacgcataaccatcccaccgagatcgagcccttcggcggcgcggccacctgcatcggcggctgcatccgcgacccgctctccggccgtgcctatgtccatcaggcaatgcgtgtgacgggcggcggtgacccgagaaaggagcttgccgaaacgctttcaggcaagctcccgcagcgcaagctcgcgcagcccgccgcggggggctattcctcctacggcaaccagatcggccttgctaccggccatatcgcggagctgtaccacgagggctatgtcgccaagcgccttgagtgcggtgcagtcgtcgccgccgcgcccgcggacaacgttgtgcgcgagcgtcccgcgccgggtgatgtggtcatcctgctcggcgggcgcacggggcgcgacggcatc

SEQ ID NO: 310 - DNA, 1173 bp, Unknown
  BMI gene
  misc_feature: SEQ ID N?876821
atgaagagtagattgattttattggcatgttgcctgtcactgttcagttgcggacaaagtgacaaaactgcgggtaaagcacccgaatttgcagtgattacagtggaaacaaccactgccaacttgacgaacagctatccagctacgatcagaggtaaacaagatgtagaaatccgccccatggtaagcggtttcatcaccaagttacatgtagacgaaggtgcagtagtacgtaaagggcaagtgttgttcagcattgaccctgtacagtatcaagcagccgtaaactcagccaaagctgctgttgaaacagccaaagcagccgtaaacacgcaagaacttaccgtaaacaacaagcgtgagctgaacaaaaagaacatcatcagcaactacgatttgcagatggcagagaatcaactggcacaaacaaaagcacaattggcacaagctgaagcacaattagtaaacgccaagaacaatctgtcgtataccagtgtaaccagccccagcgatggcgtagtgggtagtatcccctaccgtgtaggtagtttggtcagcccttccgttgccagcccattgactaccgtagccgatatctctgagatgtacgcctacttctccatgaccgaaagacaattgctgtcgcaaatccgtgaaggtggtagtatcaaggaaattctggaaagaatgcccgatgtacagctacagcttatcgatggaaccatgtatgccgacagcggacgtgtagaaaccatcagcggcgttatcgatcagactaccggttcggtaactatgcgtgccctcttccccaacaaacacaatgtgttgcgtagcggaagtaccggtaatgtggtattccccaacccgatgacaaatgttattatgatacctcaatcagctactacagaaatacaggacaagaagttcgtattcgtagtgcagcccgacaacactctgaagaacacggaaatccaggtgttcaagctgaatgatggtaagtactactacgtaaccgaaggtttgaaagccggtgataaagtagtaatggaaggtgtgcaaaacctgagagacggggcatctatcactcctatcactcctgctgaaaaagaagctgaatatcagaaagcactgaaagaccagaaagaaggtaatatccaaactgcgtttaattaa

SEQ ID NO: 311 - DNA, 663 bp, Unknown
  BMI gene
  misc_feature: SEQ ID N?889374
ctctgccttttcaacgaggagaccaactaccgctcgtcgctttctccgttcggtatcaagatggtggatcgtctcacgggaaaaccgctgcatctggacatctccgacctgccgatgaaacgcggcacgataaccaaccgcaacaaatttattttagggccttctggcagtggcaagtcatttatgaccaatcacttatgcaggcaatactacgagcaggggacgcacattgtgctgattgacacgggcaactcctatcagggcttgtgcgagatgatccgccgcaaaacgggcggcgaagacggtgtttactttacctataccgacgaaacgccgatagcctttaatcctttctatacgaacgacaaggtgttcgacatcgaaaagagggagagcatcaaaacgctgctgctcacgctctggaagaaagacaccgagcctgccacccgtgccgaggaggtcgccctctcgaacgccgtcgcgctctatatcgagcgcatcaagcgggatacaagcgtggagccgtcgttcaacacgttctacgagttcgtgaagaccgactatcgcactgtgctggaagagaagcaggtgcgggaaaaggacttcgacatcgcgggatttctcaacgtgctcgaaccctattatcgcggcggagagtacgat

SEQ ID NO: 312 - DNA, 993 bp, Faecalibacterium prausnitzii
  misc_feature: SEQ ID N?896511
atgatctgtctgaaaaataaggattttctgaagctgctggactttaccccggaggagatcgcctatcttctggagctggcggctgatttgaaggccaagaaaaaggccggtattccccacgcgctgtgtcagggcaagaacatcgccctgatttttgaaaagaccagcacccgtacccgctgtgcctttgaggtggcgggccacgatctgggcatgggcgttacgtatcttgaccccaccggctctcagatcggcaagaaggagagcatcgccgacaccgcccgcgttctcagccgtatgtttgacggcatcgagtaccgtggcttcggccagagcatcgtggaggagctggcccagtatgccgacgttcccgtgtggaacggcctgaccaacgagttccatcccacccagatcctggcggacttcctgactattcaggagcactgcggcggcctgaagggcaagaagctggtgtacatgggcgacgcccggtacaacatgggcaacagcctgatggtgggctgcgccaagatgggcatgcactttgtggcctgcgcaccggagaagtatttccccgacgcggcgctgatcgccgaatgtcaggccatcgccatggagaccggcgctacgctggagttccagaccgatcccgccaaggccgtgcagggcgccgacgtggtctatacctatgtgtgggtctccctgggcgagccggtggaggtgtggaaagagcgtatcgccgatctggctctctatcaggtgaatgcccagctgatggcgcaggccggggaaaaggccgtgttcatgcactgtttgcccgccttccacgaccacaagaccatcgtgggcaaggagatgggcgaggccttcggccgcgacgccatggaggttaccgacgaggtgtttgaagggccccagtccatcgtctttgacggggcggaaacccgcaggcacaccataagggcggtcatggccgccacactggccggataa

SEQ ID NO: 313 - DNA, 693 bp, Unknown
  BMI gene
  misc_feature: SEQ ID N?896614
atgaggaataagctgatctattgcatcccgctggcactgagtattacatgtttgatcggttgtgcagccaaggcggctcagatgccggcagaaccggaacctgtggccctgcttcccgaacagaagcagtcttccatcgttacgaatgatgcaaggaatgaaacgatcccaactccacagcagtccgaacacgaagataccccggtacgcatcgtggaaagcacccctgcggacactccggcaaatgcagaaaccgaggtgccgcaagcggcctctgtgcccaccacgcagcccaatgtcacagaggacattccttccgagacagtccacgccaagacgggctatgtggaaccggagcctgctccggagccggaacccacgcctaaacctacggcaccggcagaccggcaggcggccattgacgtagccaacgcctacgcggtcacgcagtacggtgtcaccacggacagcggcctgacgctggacaacagcgcctaccgcttccccgccgcggtaccaacggacgcctcgcaagagacgttagaaaccaaggcgcgggacatggtggacttcaccttccgccagctcatgatgcaggcgggcagggacagtgtggcggatgccggtttccactgcaacgtctgcattgtggaggatggaggaagcctactgatctacgtcctctataattaa

SEQ ID NO: 314 - DNA, 960 bp, Alistipes putredinis
  misc_feature: SEQ ID N?896936
gcggtgctcaacggcgtcgccgtgggacagacggtctccgtgggtctgatcgacgtgctgtatctgggcatcaagctgggcatctatccctgcctgatcttcatgggcgtgggtgcgggcacggactttgagcccctgcttgccaatcccaaaaccctgttgctgggcgctgccgcgcagctgggcatcttcctgacctacgtgggctgccgcctgagtggcctgttcaccggtgcggaggctgcctctattggcattatcggcggtgcggacggccccaccgccatcttcgtcaccgccatgctggctccggcgctgctgggccccattgcggtggcggcctgctcctacatggcgctggttcccgtgatccagccgcctatcatgaaggcgctgaccaccgaaaaggaacgccagatcgtcatgaagcccctgcgtgaggtcagcaagaaggagaagatcatcttccccatcgtggtcaccatctttgtggcgctgctggttccctccgccgcgccgctgatcgcctgcctgatgttcggcaatctggccaaggagtgcggcgtcaccgaccgtctcagcaagaccatgcagaacgagctgatgaacatcgtcaccatcttcctgggcgttagcgtgggcgctaccgccaccggcgcgacgttcctcagccccaagaccctgatgatcctgggtatgggcatcgtggccttcggcttcggtactgcaggcggcgtgctgctggccaagttcatgaacctgttcctgaaagagaaaatcaatcccctcatcggctctgccggcgtgtccgccgttcccatggcggcccgtgtcagccagaaggtgggtcaggaggccaaccccggcaacttcctgctgatgcatgccatgggccccaatgtggccggcgtcatcggctccgccatcgccgcaggcgtcttaatttcgctcttcggctaa

SEQ ID NO: 315 - DNA, 372 bp, Unknown
  BMI gene
  misc_feature: SEQ ID N?897489
cggggcgagccgtatctgcggcggtttatactggtgcccctgagccagcatttcttggtaatcttcagcgcggtgctttctctgttccgccgtgcgccgctgggcagctatctgctgctgggcgccatggcactgtgctgcgtgctggccgacttcctgctgtttcacgggctgcggaattacaccaaccagcagctggcctactacaacggcgtggtggcacacatcgaagagaccgcccggctgcggcatgagctgcgcaatcagctgcaaactgtttatgccctgatggagcgcggcgaatatgaccacgcacaggagctgctgaccgcctttgccgtaccgctggccgcaggagaggaggtacgctga

SEQ ID NO: 316 - DNA, 1464 bp, Unknown
  BMI gene
  misc_feature: SEQ ID N?898035
atgttacagagaatgaacgaattagcagttcaggcagctaacggcacaaactctacaacagaccgtcagtacatccaggatgaaattgaccagctggtaacagaagttgaccgtgtatctgagacaaccaagttcaatgagacatacctgttaaaaggtgacagctccaaggctactacaaagacatatacagctaactatgcagtaacctatgcaaagaatactggtacaaatacgggcgcatcaaaagcaggcgcaaattctactggtgttgcaaataaagtaaattatacaggaaatgctaatgtatatatggttaatgttacatcagtatctaaatctaatgccagcacaccaattacatcagatgtaattagcaatggcgatgatattaccaagtatttggctaatacaacagaagctaagaatggtgcattatcaggtgctaatcttgattctaactatgcaatgtttaagaatgtagatgcaagcaagttagaaattgacaatgctaccgctgccactggtacaaaattaaattacaaagatgggaagcttacagcagaacatgcggcatacattttagatacaaagactaattctatttttaagattgctgcaggcgaagatttatcagattacatggatgtaagtgataatgagaaaaaagtatctatgaaagatcagtatagattacttgatcaggttaaattaagtgcaactgcaacaggtaaaacagcagatacagatactacagcagatgcaaatacattgggagcagatataggtgctactaatgatgtagacgttacaaaagaattaaagcttggcgaatctattaagaaattgtatgatgcagacggtaaagaagtatcaggtattgcattaaataaatactttgatgagaatggtaaatacaaaggtggcttgttctcggattcacaggctacaacagcagttgtaagtgacgatactcagggtgcaacggctgacactaagatttcatcttatattacaaagagctatggtgaagtagcaggagatttaagcttcagccttcatgtaggtgctgattcagctagaactaataagattgagactaacattcaggctatgtctgcagcagcacttggtattgataaactttcaagtaactctgtaggtatcgtagatgagacaggtgacaatgcaacagatgctattgatgtaatcgcagatgcattacagaaggtatctacacagcgttccgcacttggtgcagtacagaacagattagagcacacaatcaagaacctggataacattgtagagaacacaacaagtgcagaatctgcaatccgtgatacagatatggctacagagatggttaagaactctaacgctaatatcctttcacaggcaggtcagtctatgttagcacaggctaaccagtccaacaagggcgtactttcccttttaggctaa

SEQ ID NO: 317 - DNA, 483 bp, Unknown
  BMI gene
  misc_feature: SEQ ID N?899154
atgaagtcgagatccaacgaattgctcgataagagcattgctgcaatgatttctgctatcgaaatctataacaaaccagattttttgtatcgcggggaaaccttttcaatcttagcaatcaatagctgggagctgctttttaaggcaaagctcctcaaagacaatcacaacaagatgcgctcactatatgttacagagccaatcagaaataaggatggaagcaagtcaaaacgacgccgaattaaactaacaagaagtggaaatccatttactcactcaatcgattacatcgccgaaaaattgattgtaacagggaaattggatcgaaccgtatgggacaacattaccgcactgatcgagttgagggactctgcgatccatttttacaactactcggcaaaattcaatgttcgtatccaggaaattggaacagcttcactaaagaattatgtgattttgtataagaaatggttcggaagagat

SEQ ID NO: 318 - DNA, 495 bp, Unknown
  BMI gene
  misc_feature: SEQ ID N?899650
tttctcgacgagctcaaagaactcgaatttagggggtatgaatacgaggctgccgacgcgtctttcgggcttttgctcgcaaaatatttaaaaaaatacaagccccactttaaagtccgcggctaccgcgcgatagtcgagcgcgatgaacttgcgggtacgacaaagtccgaggcgacggtaaagcttgaaatagaccgcaacatagagcacactgttgcggaggcgcacggccctgtcgctgccctcgacctcgcgttgcgcaaggctttggtaaaaaaattcccgtcgataatgtcgatggatctgaccgacttcaaagtgcgcataatagacagcggcgcgggtacaaacgcaataacccgcgtaatgatagagtcaaaggactcgaagggcgaaatctggggaactgtcggtgcttcggacaacataatagtcgcttcttgggaggctctaaaagattctttcgaatacaaattatccaaagaggattga

SEQ ID NO: 319 - DNA, 1713 bp, Unknown
  BMI gene
  misc_feature: SEQ ID N?900518
atggcaaggacccaaagcgcggcgctggaccggaaaaagctgatggccgatcccatcatggtgaccaccatcgtcgtgctgatcgcgtttctgactttgtttatcctctacccgctggccattctgctggtggatagttttgtgggagacggcaccttcggcgtgtccatcttccagcgcattttcgccatgccgacctttaccagagccatcaccaacacgctgaaggtgggctttctggtgggcattctgtctgccctgatcggcttgctgttcgcctatgtggaggtctatgtccgcatgggcaaattcgtgggcggactgttcaaggtggtgtccatgctgcccgtggtgtccccgcccttcgtgctgtcgctgtccatgatcatgctgttcggcaaggcgggcatcatcacccgctttctgctgggcatctatgacaacagcgtgtacggcttctggggcatcgtcatcgtgcagacgctgaccttcttccccgtgtgctatatgatgctgaagggcctgctgaagaacattgatccctcgttggaggaggccgcccgcgacatgggagcctcccgctggaaggtgttcaccagcgtgacgctgcccctgatgctgccgggtcttggcaatgcgtttctggtgacattcatcgaatccattgccgacttcgccaaccccatgatcatcggcggctcctacgacacgcgggccaccaccatctatttgcagatcaccggctcttacgacaagcccggcgcggcggccatggccgtggtgctgctgtgcatcacgctggccatgttcatcgtgcagaagtactatctggagcgcaagaccgccgccaccctcaccggtaaggcgtcccgcgcccgtatgctgatcgaggacaagagcgtcaagatccccctgactgtgctgtgcgcactggccgccagcttcgtcatcctcatgtacctgtgcgtgcccatcggcgcgttcttccccacatggggcttcaagttcttcccgctgacaggcaagtggttcggtctggtattctcccggtatcacggcttccaggccttccgggattccttcgtgctgagcctgatctccgcgcccatcacggcgctgctgagcatgatcatctcctatctggtggtgaagcggaagttcaagtccaagggctttatcgaggcggtgtccatgctggccatggccgtgcccggcacggtgctgggcgtgggctatatccgcggcttctccagcggcgtgttcggtagcggctttttgcagggcctgtacggcacgggactgatccttattatcgtgttcgtggtgcgctcgctgcccaccggtacgcgaagcggtatctccgccctgcggcagatcgacaaatccatcgaggaatccgcctatgacatgggcgcggacagcttcaaggtgttcatgaccgtgacgctgccgctgatcaaggattccttcctcagcggtctggtgacggccttcgtccgcagcatcaccgctatctccgccatcattctgctggtgacgccgcagttgctgctgattaccgtgcagagcaacgaattcgccgaaaagggctcctacagtctggcctgcgccttcgccaccatcctgatcgtcattacctacggcgcggtgctgctgatgaacctgttcatgaagtacttcggcaccagcagaaagctcaaggagggcaaataa

SEQ ID NO: 320 - DNA, 798 bp, Bacteroides capillosus
  misc_feature: SEQ ID N?900813
gccaccgccgagtatctgaaaaacgaggtttccgacggcatcatcgcccctgcttacagcgacgaggcgcttgccatcttaaagacgaaaaagggcggcaaatacaacatcgtgcagatcgaccccgcctacactcccgcgccgctggagcagaaggatgttttcggcatcacctttgagcaggggcacaacgactgcaaaatcgatgagagcctgctcacgaacatcgtcaccgaaaataaagacctgcccgagggcgcaaagcgcgatatgctccttgccctcatcacgctcaaatacacccagtccaactccgtctgctatgtgaaagacggtcaagccatcggcgtgggcgcgggccagcaaagccgcatccactgcacccgacttgcgggacagaaggcggacaactggtatctccgccgccatccgaaggtgctcgccctctcgttcgtggacgacatccgccgtcccgaccgcgacaacgctatcgatgtctacctctccgacgagtgcgacgatgtgcttgccgacggcgcgtggcagcatatctttcaggagcgccccgaggcactcacgggcgaggaaaagcgcgcatggctcgcgcagcagcgcggcgtgaccgtcggctcggacgcctttttccccttcggcgacaatgtcgagcgcgcgcgcaggagcggcgcttcctacatcgtcgagccgggcggctcgatccgtgacgacaatgtcatcgagacggcaaacagatacggcatcactatggcgttcacgggtatgcgcctgttccatcattaa

SEQ ID NO: 321 - DNA, 303 bp, Hyphomonas neptunium
  misc_feature: SEQ ID N?901388
atgaaaacggcaaagattttcatatttttcatagttatcgcatacgtcggggttttctctaatgccgaaaatatttcggaagcgcgcgattttaggcggatatacgtggcaaggcatgggcagagaacatccggcggagatccgtctcttactaggttgggagtggaacaggcaaagttgttggcgcggcgcattcaagaaattggctttgatggaaagatatatgcttctccgtatctcaggacggtagagaccgcctctgaaattgccaagctatttggcattaagatgatccttacgccg

SEQ ID NO: 322 - DNA, 297 bp, Bacteroides intestinalis
  misc_feature: SEQ ID N?901806
atggcgatgaaaagattacttttgaccctgatgttattgggaacttctcttttgatttttgcacaggattatcctttttcggtagtaaaatcgggaacaggaaaacaagcggttatatttatacccggttttgcatgctcgggtgatgtctgggcagaaacagtcagcgtactgaaagacagctatacctgctatgtgctgacgatggcgggcttctcgggcgttgcacctgaagagttccatcattcgaaagatggaaaatgcagattgcaaagtttatcaaagaggagcggatag

SEQ ID NO: 323 - DNA, 1257 bp, Unknown
  BMI gene
  misc_feature: SEQ ID N?902420
tccaccacctccatcctgtccagcggtctgaccacagtcatcggttttctggcgctgtgcctgatgcagttccttatcggccccgatctgggtctggcgcttgcaaagggcgtggcgctcagcctgattaccgtgttcacctttatgcccgccctgatcttgaaaacctacaagttcatcgacaagacccagcaccgctccttcatgccgtctttcaagggcttcggcaggtttgtcagccgcgtgatgctgccgatggcgctggttttcaccattctgatcgtccccagctatctggcctccaacgccaacagcttctactacggtgcgtcccatattttcggcagcaccacccagctgggtgcggacaccgagaagattgaggacgccttcggccagcaggacacctacgtgctgatgatccccaaggacagcaccgccacgcagacggagctttcgcaggcgctgcaggatatcccgcaggtaaagagcattctgtcctacgtggacacagtgggcgctacgataccggagcaatatctggacagcggcacgctgtccaagctgaacagcgacagctatacccgcatggtgctgacggtagacaccgcgtatgagggcgacgacaccttctctctggtggagtccatccggaacacggcggaggaatactatcccggcacgtggtatctggccggtgaaggcgtgtccacctacgatttgatggacaccgtcaccgccgacatggtgaaggtaaatctggtggccatcggcgcggtgtttgtggtgctgctgttcaccatgaaatcgctgatcgcgcccataattctggtgctgtccatcgaaacagccatctggatcaacctgtccatcccctatttcagcgaccagacgatcttctacatcgcctatctgatcatcagctccatccaacttggcgcgacggtggactacgccattctgttcaccgaccggtataaggagatgcgccagacctacgaaaaaaaggaagccgttgtgcataccgtttccgctgtgtccgtctccgtgctgacctcggccagcgtgatggcggtggtgggtttcctgatgggcacgctctccacccacggtctgctctcgcagctaggctactttttaaggagaggaacgctttgttctctggctatcgtgctgttcgtgctgccggggctgctgtatctgtttgacaggtttatcacccggaataaatcatccaaggaggttctttctcaatga

SEQ ID NO: 324 - DNA, 294 bp, Unknown
  BMI gene
  misc_feature: SEQ ID N?904007
atggttaacacaatttggaaagaaaactttctgattatgtgtagtaaattatgcttaaacgcccgggattctgggcattttgctcaattactactcatttgtaggaactactcattacagacgttatgtggtgcaccacataagatctgtaatgacaacggcattgcagaaaacctgccgctgaaccgtatgctgggcgactatgacatcatccatggcacgtttttcgtctgcgggctgaccagcaacgattttactgaccttaccccgcagcagatgaagcgctacgaggaa

SEQ ID NO: 325 - DNA, 582 bp, Unknown
  BMI gene
  misc_feature: SEQ ID N?904792
gacgtcccgcttgcaatggaaaataccgacagaaatctatcaaaaaaatacctcggcaaaatcgacgtgaataagcgggatagcaagtatcaggaatacctgcgcgaccaatactccgagttgatggaaatgtccatgcgcgagataaacaagttttattttcgcgagtcccactcggcggatccgggtatcccgataacgaccgccggcggcgccttgcgcaataacgaggagtctttttgggactttttatccccaaataagaaaataggcaggggaagagtttttgtgcggaaactaaaatttgattcatcggggaatattgtggattctgatgccccagattcaccgccaacaatttccaaaccggcggcttctccttcaagcccgacagccgcgtcaagaacgacgtcttcggcgcctaataaaaatgttcctccccagcgttatcgcggcgaattgagatctatggagaaagtcgacgacaatattggcaggcaattcgacattctcaatgtcccggaagagatgcgttcagggagcccaacgatacgcgttgaagtcaaagattccgatttttag

SEQ ID NO: 326 - DNA, 1671 bp, Bacteroides pectinophilus
  misc_feature: SEQ ID N?905909
atggagtggctttcgctggctcttgtgacggcctccgggttgatctataacgtgggcctgctggccacgccgtggtttgaggggtggctgacccagtgccttgcggatattctgggtggcaacgagaccgccgcccaaatggcggtgctggtgctggcctatatcgcggtgacgctgctggtgcaggcggcgcggttcatcaagcggttctatgtccgccgctttgccaacaacatcaaccgccggatgaagggcgtcctgtacgccaatctggtgcggcagagccgcgtcgcgctggagcaggagggcgcgggcgagctgatgaccaaggctatctccgatgtggacgactgcgtggagggcatgcggaagttcaccaccgagatcttcgataccggcctgccgctgacgtttctggcggtgctgctgtacttcggcagccttgcactggaggaggtattctcctcggcgcaggagagtttgctggtgctgttcggccagaaaatgacccacgcactgcgctcggaaatgtcccggaagctgacgcggctgcctgccggtacgctggcgggccagaaccccggcgaggtggcggcccgcttttccggcgatgtggacaccgtggaggcgctgttcacctccggcatcatcagcatggtggcggacgcctgccgcattgtctccattctggcggtgatcgcggtgaaaaacacaggtcttgcgctggttctgctgctggtgcttccgctgttcgcggtctttacccgccatgtgcagaagcggatgctggccgcccagctggacaaccgccgcgccgttgccgccgtgtccggtcaggtgccggagacgctgcacaacatccgcaccatccgggcgctgggcatcgagacttaccgggagcgccgctatgaccggtgcatcggcgacagctatgccgccatggagcggaccaacttctatgatgcggtctattcgccggtggtgctgctgttgaacgccgttgtggtgggcgtcgtcatgctgctttccgcctccggaaagacggagattttgcgcctgttcggcatgtcggtgggcacctcggtggcggtcatcagctatatctcccgcatttttgcccccattgaaagccttggcatggagatccagagcatccagtccgccatggcgggtgtcaagcacatcgacgcctttctggcccagccggagcgcaccgttcctccggagggggaaaaggtggcgcggggcgatgtggcgctctcccatgtgaccttcggctatggggaaaagccggtgctggaggacttctccctgactgtgaagcagggggagcaggtcacgctggtgggtcggacaggtgcgggaaaaagcacggtgttcaggctgctgctgggactgtatccgccccaaagcggcacggtgaccatcggcggcgtggacgttgcggccattccggatgggcagcggagcccctgcatcagatgcgtggagcagcactttgcccgcgtaccgggaacagtgctggagcagatcaccctgaacgatccgcagatcaccggggaaatggcgcgaaacgcggcgaagctggcggggatcgacgacgccattcaggcgctgcaggagggctacgatacggtgtgtaccgacggcatgttcccccagggcgagtag

SEQ ID NO: 327 - DNA, 303 bp, Unknown
  BMI gene
  misc_feature: SEQ ID N?906112
gtgccggatacgattgccaaatccggattgtccgacaacctcacccattctttccccgaaacatacaccgactcgaccacgggatttaaaaccgcaataaccgtaatgataaacatcgcaatatacggcaacaacaataacgggaatttccacgaggcgccagaccttacagtgcgccaattagaaacgctctggtataggtttcttggggcaagtatgccgagcgcaattagcgtcccgaccccccaagaggagtcgccacccaacataaacgcgggaacgcatactgcggcaacctcgtag

SEQ ID NO: 328 - DNA, 285 bp, Unknown
  BMI gene
  misc_feature: SEQ ID N?908294
gtggtaattacgcgaattgggcttgagaacgcggcgacggcgttttcatgggcggcgtcggagctcgattttgagtctgcaataaatataggggcggcgggggctgcatctcaaaaattcgtggcgcaagatcttggcaaaattttcgacgtaaaaagcgtatcttgcatcgagccctattgcggcgaggtttttgaaatgcagacaatgggcggctgcgaaactgcgacccttgcgccctccagccggcctgtcgcgtcggcaaaggacagggagcaggcttaa

SEQ ID NO: 329 - DNA, 216 bp, Unknown
  BMI gene
  misc_feature: SEQ ID N?912704
atgagggttgcagtacggcaaaatgaaaagctctatgtgcaggtaacgcaggagcttcgttctccgaaaacggaaaaacgggaatatgaccgtttgttggtgattcacgacaactaccccaaatatgttctcacaacggatgagttctcaggaggaaactacgagggcataaagacaatgcacatagctgacttcctgttaagctctgcatattaa

SEQ ID NO: 330 - DNA, 1341 bp, Unknown
  BMI gene
  misc_feature: SEQ ID N?915416
ttgaataaacaattacaggcaatgctttttgttacgaaaggaaaagaaaaggagatgggttttgtggtgacacaggatttagtgaaaaaattaaaagatggattgtatgatgcaaaactgaaagatatctatgtagatgaaaagaagatatcgtatgaaagaaatcgttatataaaagcagtggagagttatacggtacattttggtgaaggtgaggtatctgtctttagtgcaccgggaagaagcgagattggtggaaatcatacagaccatcaatgtggagaggtgctggcggcgtccatcaacaatgatgcgattgctattgtgcagaaattaaaagaaccatgcgtcaaagttatatcggatgggtatgaattgattacgatagatttggatgatctggacaggagagaggacgaggcggtaacaacaaatgcactgattcgaggggtattagcaaaaacaaaagaatatgggtatcagataggaggctttcaggcttttgtcaccagtgatgtgctgatcggagcgggattatcttcctcggctgcatttgaaacgttgatgggaaccatcttatcctatctgtttaatgatggtaaaatttcgccgattgaaatcgccatgattggacagtttgcggaaaatgtatattttggaaaaccttgtggcttgatggatcagatggcatgctctgtaggcagcttggcacatatcaattttcagaatccgaccgcaccttttgtagagcggattgagtttgatctggatgctcagggatatagtctttgtattacagatacgaaaggctcccatgctgatttgacagcggagtatgcagcaattccggaagaaatgaaaaaagcagcagcctgtcttggaaaagaagtgcttggacaagtttcaaaaaaagaaatacttgcaaatttgtcaggaatcagggaaaaggctggtgatagagcagcacttagagcaattcactatgtgtgtgaaaatgagcgagtgcaaaaagaagtggcagcattgagagagaatagatttggagaatttttaagattagttaaagagtcaggtgattcttcttataagtatttgcagaatgtgtatgtgtgccatgatgtggaacatcagaatgtttctattgcattggctgtcagtgatatgattttaggcgtgcagggagcaaacagggtgcatggtggtggctttgccggaacaatacaggcatttgtaccaaatgatattgttacattatataaaacagagatggaaaaggtgtttggagatggtgcttgtgatgtacttaaaattcgcaaatatggtggaattcaagtgatgtaa

SEQ ID NO: 331 - DNA, 705 bp, Clostridium nexile
  misc_feature: SEQ ID N?921992
atgattggagtgaatcctatgaaaatattgttaatagaagatgatacccagttgtgtatgaccataaaagaacaacttacaaaagaaggatatattgttgatacctgcaacgccggagatgaagcatttctgtatgcagtagatcccgacaatgattatgatctggcaatcattgaccgtatgctccctattattgatggtctatccatcatcaaagccatgcggcagaaaaacattcagattcctgtcatcatcattactggactgtctgaattgaatgataaaattgaaggacttgacaatggtgcagacgattaccttattaaaccttttcatatcaaagagctttccgctcgtatccgggcattggtaagacgtccccctcagataaaggaaaacctaacccttgaaattgatgatttatccttaaatctcgccagtcacgaattatcgtgcaaccacacttctcttttgcttacgccaaaggaatttcacctgatacagattttcttatcttcgcccggtactattttttcaagagaacagctactgcaaaaagtgtggaatacaaatgatgaagtagaaccgggaaatgtagacaattacatctattttttacgaaaaagactaaagtgcttaaacagcaactgctgcatcaattctgtttatggttccggatatagtttggaggtaaagcatgattaa

SEQ ID NO: 332 - DNA, 1251 bp, Unknown
  BMI gene
  misc_feature: SEQ ID N?924353
atgcaaacggaggcattcaccatgaataaaaaagacattaaaaaggtcgttctcgcatattccggcggtctggacacctcgatcatcatcccgtggctcaaggagaactacaacaactgcgaggtcattgccgtttccggcaatgtcggtcaggcagacgagctggagggacttgaggaaaaggcacttaagaccggcgcgtccaagctgtatatcgaggatctgaccgaggaatttctcaccgactacgttttcccctgcgttcaggcaggcgcgctgtacgaggactatatgctcggaactgctttcgcccgtcccccgatcgcaaagcgcattgccgagatcgctatcgccgagggcgccgacgccatctgccacggctgtaccggaaagggcaacgatcaggtgcgttttgagcttgcgataaaggcgtttgcgcccgatatgccaatcattgcgccgtggagagagtggaatatcaaatcccgcagcgaggaaatcgactatgccgaggcgcacaacattccgctgaagataaaccgcgagaccaactactcaaaggacaaaaacatttggcatctgtcgcacgagggactcgatcttgaggatccggcgaatgagccgctgtacaataaaaaaggcttcctcgaaatgggtgtttcgcccgaaatggctcccgacaagccgacctatgtaaaaatccattttgagcaaggcatcccgaccgctgtcgacggcaagcagatgaacgcaaccgaactggtcgccaccctcaacaagctcggtggcgaaaacggaatcggactgctcgacatcgtcgaaaaccgtcttgtcggcatgaaatgccgcggcgtttacgagactcccggaggagctatcctctacaaggcgcacaacgtgctggagaccatttgccttgataaggagaccgctcactacaagtcgctcgtagcgcagaagctgggcgaaatggtctataacgctcagtggttcagcccgctgaccgacgccattcttgcatttgttcgccagacacagaaaacggtcaccggcgacgttactctcaagctctacaagggcaacatgataaacgccggcgtcacctcgccctactcactctatgaccccgagatcgcgacatttgacgaggacgacgtgtacaatcaggcagattcggcaggcttcatcaatctttacggtctgcccatcaaggtcaacgcaaaaatgaaagcgaaaaataacattaagtaa

SEQ ID NO: 333 - DNA, 642 bp, Faecalibacterium prausnitzii
  misc_feature: SEQ ID N?926510
atgaaaaaacatattgtctgctttggcgattcaaacacccacggctactgcgcagaccccaacgacaccgccggccgcaccgaccgcttcaacgaggatgagcgctggacctgccttttgcagaaggcgctgggcagtgactatctcgtgctggaggaggggctttccggccggacgaccgttttccgcgatccgctgcatgagtgcatgtccgggcttgacgtgatatattccacgctcatgacgcatgagcctgtggatctgctgatcatcatgctcggcacgaacgacacgaagcagcgcttcaatgcaagcgccacctgcttctgcatcggcacggagcgccttgccatgaaggcagagaccgtcgccgcgtggcgcggcgggaagccgaaaatcctcatcgtcgcgccgccgcacatcggcgcagggcaaaacgatcccgccatgggggcgtcctgccacgcagcgtccatgggcgtggcggaagaataccgcaaaaagtgcgccgcgcacggatgggctttcttcgacgccgagggcgtggcggagttcaacacggtcgattatatgcacctcagccgccttgggcacagccagcttgccgccgcccttgcgccgctggtgcgtgagctgacctga

SEQ ID NO: 334 - DNA, 315 bp, Unknown
  BMI gene
  misc_feature: SEQ ID N?927762
atgaaaatcgaaagcagaaatgaaggcagaggaatactcatccacaggcagatactgagtgtggatgaatacaggaagttatccggcctatctccgggaaaagaaggcacactttcttctttgaaacagcagcttgaagaaccatcggaacccggtaaggatttttggtggtcgcctgttacggatctggaatttctcagagtaaaggctgtggagggatcgattaaaacggcgcttgttactgacgggaaagccgtaataatctgtgagctgccaaacgccatcctaagagaaatgtttgtcgaagcggactga

SEQ ID NO: 335 - DNA, 930 bp, Unknown
  BMI gene
  misc_feature: SEQ ID N?927763
atgactatggaaaaggacaagagacttgcggagattattaccgatattatttttcatcacacttcctgcgattatcacaaggatgaaggcttcttttcctgcgagatctatgcggactaccgtgattatgccgaaaacaacacgattatcaagtggtgtgaagcagacaatccacgcgaggtgttcaatgaggacctgttttgctggtatcaggatttgattttcgaatatgaagatgatgtgattgataccgttaagaagcattggaccgatgcggagctttcatttgatgataacgaagagtttattgttgactggattcgtgagcacgttaccgttgagctcccgacggaccattatcttcagcaaaaagtatgcgtggatatcatcgtggataccggcgacgggaattatgacttcgtttgcaatgacatttttccgcactataacgcaagatttggagatgtgatccaggaagaagcatctgttctttggcttgcaaggcagcagggatacaagaagagacagcttaatcgggctatgcgtcattgcgattattcggggagcgaattgctgaaaagccttcgtgccgaagttcataattgttcttcgcatatgaatgcactgaccttttttgtggagatgactgtggagcagctgtttgatttgaacgaggcgatgaaagataaaggtgaaaacggaactgtccggaaacgaaaagtcactcttgataagtcggccgtatgcggtctttatgacaactggtccggtgcaggctcaattcttgaaatagagcttgaaaaggatgttgtgcttccgatgaagtacatcggcacagctctgccggatggcggacgggggtacagcgtggcgagtatatacggtgtgtgcagttctatgtggacgccgacattaaagaagatagcgtga

SEQ ID NO: 336 - DNA, 2526 bp, Unknown
  BMI gene
  misc_feature: SEQ ID N?929559
atgaaactctcattttccactaaaggatggcactcaaacaactttgacgagttttgcgaaattgcccgtgaactgcgttttcagggcatcgagctgcacaatataggcaaccgtctctttaccgagagcaacggcgcattttacgactacgcctccgccgcaaccgtccgcaagctgtacgaaatgaagctgtcgataccctgcatcgacgctatcggtgacattgccgatgaggaaagcgccgaacagacatttgcggaaattgaaaagtgcatttcaattgccgttaatctgcgcgtaccgtacgttcgcatccgcgcggcggctcacgatgacaccgacacggcaagaaatgcggcaaagcgtatgttggagcgtgcagtaccgattgccgaggaggcaaacgtcgctatgcttatcgagacgacaggcattttctgcgacaccggcgtgctgcgcgacctgctcaacgagtttgcctgcgagagcgtagcagcggtatgggatatgtactccccctacttctgctgcgatgaacagcccgaaaccaccataaccaatctcggcgcctacatcaagctcgtccatgttaaggacgctgtaaagaccgacagcggcaatgaattttgtctcatcggcgaaggcgatctgcccattgatgaaatgatgtcggcactgcgttcaataaactacgacggcttcttttcgctcgaatgggatcctcagtggtgtcccgagcttgacgatatggagatcatttttgctcagtttgtcaactatatgcgtcagttcggtgatacgtcaagatctcagccggcgctttaccgcaacaaagcaggcaacggcaaatatgtttggaaaaaggaactgctgatcgactgcacctttcctcaggtgctcgaccgcatggttgaggaatttcccgaccagtacgcttttaaatacaccaccctcgattacactcgcacatacagtgaattccgcgacgatgttgacacctttgcgcgtgcgctgattgcaatgggcgtgcgtgccgggcatcacgttgccgtttgggcgaccaacattccgcagtggtacattgctttttgggcgacgacaaagctcggcgccgtactcgtaaccatgaacacggcgtataaaatacacgaagcggaatatttgctgcgccagtccgatactcacacgctgataatgagcgacggctaccgcgactccaactactcggagataatcgccgaactttgtcccgagcttgaaaatgtcaagccgggcggcaaacttcacagcaaacggctgccgttcttacgcaatgtaataacggtcgggtttaagcaaaagggctgcatgacatgggatgacgcgcttgcacgagccgagcaggtccctgttgaggaggtctatcgcatggcagccgctgtcgacaaggacgacgtgtgcaatatgcagtacacatcgggcacgaccggtttcccgaagggagtcatgctgacccattacaacgtagttaataacggaaaatgcatcggtgaccgcatggatctgtcaacagccgaccgcatgatgatacaggtgccgatgttccactgcttcggcatggtgcttgcaatgacggcggcaatgacccacggtgcaacactgctgccactgccctatttctcaccaaagccggctctcgcctgcattaattcggagcacatcacggcttttcacggtgtaccgactatgtttatcgccctgctggagcatcccgacttcgcaaagaccgatttttcatatgtacgcaccggaattatggccggcagtccgtgcccgatatctgtaatgcaggatgtcgtcaacaagatgaacatgaaagacattaccatagtttacggtcaaaccgagtcgtctcccggctgcacaatgagctcaaccgacgacccgatcgaggtgcgcgtcggaacggtcggtcacgcactgcccgagatcgagtgtaagatcgtcgatcctgagaccggcgaggactgcgacgacgaggtaacaggtgagttcgttgcgcgcggttataacataatgaaaggctactacaaaatgccaaaggcgaccgcttccgccatcgacaaggacggttggctgcatactggcgacctcgcctgccggaccaaggacggcaactaccgtattacgggacggctcaaggacatgataatccgcggcggcgagaacatctaccccaaggagatagaggaattcatatacacccatcccaaggtaaaggacgttcaggtcatcggcgtgcccgacgaacagtacggcgaggagatcatggcgtgcatcattcttaaggacggcgaagaaatgaccgaggcggaaatgaaacaatacattaccgaccacatggcgcgtcacaaggttccacggtacattgattttgtcagctcattcccgatgaatgtcgccggaaagatcctgaaatacaaaatgcgtgaggacgccattgaaaagctcggactgcaaaaggcgaataaagtggtgacggcataa

SEQ ID NO: 337 - DNA, 894 bp, Faecalibacterium prausnitzii
  misc_feature: SEQ ID N?929923
atgaagctccggcttcttcctattgtcctatccggccgcatcctgcgctccggtctttctattttatcgctttttgaaggaattgtccacatgaaacgtatttttgccctctttttgtctctggcggtcctgttcagctgtttggctgtgacggcaggcgccatgttcgaccccagccccgtctacgaggtgcaggccaagagcgcctacatcgtgaacaccgacaccaacatcatcgtctacgacaaggacagccagaagcaggtgccggccggcggcctgacgaaatacatgaccatcgctctggtgatgaccaactacgccgaccagctcgacaacaccttccagatgccctttgccatctcggattacgtccacaactccgacaacgcagacatgcgctccggcgagaccttcacctaccgggaagcgctctacgccatggtgacacggaacgccaacgaggccgcgatgggcctggcgtacgagctttccggcggagacctgaccgggtgggtgagccagatgaacaccctgtcccagcgcatcggcacgacgggcagcacctggaccgatgcctgcggcctggacagcggcaacaccaccactgccgtggacatgtacctcatcctgcgctacctgatgagctttgatgccttccgggagatctccagcgcaccgaccttcacgatgcccgccaaggaaaaacacgccaagagcttcgttctggtcagccagaacgtggcgctgaacaaaacgagcggcggcaagttctaccgcagcgcgatgcagggcggcatctgcgacgtgatggcctacaagaacgacaacggcgaccagagctatgtctcctgggccaacaagaacggcgcgacctatatcttctgcatcatg

SEQ ID NO: 338 - DNA, 684 bp, Faecalibacterium prausnitzii
  misc_feature: SEQ ID N?930053
atgcttgaagccattctttccaaccgcacggccagcgttttgtgggaagcgctgccccgtatcctgtcggcgggcctcaccatgaccatcccgctgaccctcatctccttcagccttgccatggtgctggctgtggtggtggcgctggtgcagtacgccaatgtgccggtgctgcgccaactggcccggttctacatctgggtcattcgcggcacaccgttgttggtacaactgttcatcatcttctacggtctgcccagcgtcggcatcatgctggacgctttcccggcagccgtcatcgcctttgccatcaacgagggggcctactgcgccgagaccatgcgcggcgcgctcgaaagcgtaccccagggccagctggaagccggttactgcgtgggcatgacctggtggcagatcatgcgccgcatcgtgctgccgcaggcgctgcgcacggcggtgcctgccctgtccaactcgctcatcggcatgatcaaggacacctcgctggcatcgaacatcacggtcgccgaactgttcatggccggccagcgcgttgccgcccgcacctacattttcctgcccatctactgcgaggtcgccgtggtctatctgctgttctgcacggtcgtcaccaagctgcagagcctgttggagcgtcagctgaacgcccacggcttccagtga

SEQ ID NO: 339 - DNA, 2097 bp, Unknown
  BMI gene
  misc_feature: SEQ ID N?930728
atgaaaacagtatcggattatttcggcagcctcgtttttgacgacagggtgatgaaggctaagctgccttcagccgtctatcagtcactgaagaaaaccattgacgagggagcaaggcttgataacgatgttgcgaatgccgttgccgccgctatgaaggattgggcggtagaaaacggcgctacacattatacgcattggttccagccccttaccggcattacagccgaaaagcacgacagcttcatttcacctgcgccggacggccgcgtcatgatggagttttcgggcaaggaacttataaagggcgaacctgacgcgtcgtcatttccgtccggcggactcagagcgacctttgaggcaagaggttataccgcatgggacccgacgtcatatgcttttataaaggataagacactttgtattcctaccgcgttctgttcatacggcggtgaggcgctggataagaaaacgccgcttctccgctcaatggaggcgctgaataaacaggcaatgcgtattctccgtatgttcggaaatacggatgtcaaatgtgtacgcacttcggtaggacctgagcaggaatacttccttattgataaggaaatgtacgaaaagcgcaaagatctgatgcttacgggacgcactctgttcggtgcaaagcctccgaaaggtcaggagctggatgatcattacttcggcgtaatcaagccgagagtagcggcgtacatggctgatctgaacgaagagctgtggaaactcggtattcttgcaaagaccgaacataacgaggtcgctcctgcacagcatgagcttgcacctatctataccactacaaacatagctaccgaccacaaccagctcactatggagatcatgcaaaaggttgcgtcccgtcacggactggtttgtctgctgcatgaaaagccgtttgccggcgtaaacggcagcgacaagcacaacagctggtccatggctaccgatacctgtgttaacctgcttactccgggcgaaacgccgtatgaaaacgcacagttccttttgttcctttgcgccgttataaaagcggtggatgattatcaggatctgctccgtttgtcggttgctaccgcaggaaacgatcatcgtctcggcgccaacgaagcgcctcctgccgtcgtttcgatattcctcggcgatgagctgaccgccgtgcttgatgctattgagagcgacgcaccgtacagcgcggctgaaaagaccgtaatgaagctcggtgtacacgttttgccgaagttcacccgtgatacgaccgaccgtaaccgtacgtctccgttcgcgtttaccggtaataaatttgagttccgtatgctcggatcgtcaaacagcattgcctgtgcaaacatcatgctgaatgcggcagttgcagagtcgctcaaggtttacgccgaccgcttggaaaaggcggacgactttgagaccgcgctgcacgacatgatcaaaaagactattaaggatcataagcgtatcatatttaacggcaacggctacgacgacgcatggatcaaggaagcaaccgaaaagagaggacttttgaatctccgcacaacgcccgatgcgctgccaactatcctcgaaaagaaaaatgtggatatgcttaccgctcacaaggtgttttctccggctgagatacagtcacgttatgagattactttggaaaactactgcaagacggttaatatcgaagcccttaccatggttgatatggcgaaaaaagagatacttccggcagtagaggcttacgcaaaggagattgccgatacatttgcggcaaaggcgtctgttgttcccgaactttcgggtaaatacgaaaagggcgttattacaaagctctcgtcactggttgatgaaattgatgcggcagccacagcgcttgattcggcgcttatcaagtttaagaccgtcagcgacattaccgaggcatcctgcatgataagagatgttatcctgcaaaagatggctgagctgcgtgtcgtttgcgacgaagcggaaaccgtaacagccgaaaaatattggccgttcccgacctatagcgatctgctgttcggtgtgaaatag

SEQ ID NO: 340 - DNA, 1446 bp, Faecalibacterium prausnitzii
  misc_feature: SEQ ID N?932117
atggaaaaattcagtgtcaaaaaaccgttcacggtgctggtggcggtcatcatggtgctgatgctgggctttgtgtccatcagcaacatgcagaccaaccttctgcccgacgtgaatacaccgtacctgatggtggtcacggtctaccccggtgcaagcccggagcgtgtggagagcgaagtctccgacgtgatgcagaacgcattgggcaccgtggcgggcgtggaaaaggtcaccgccacctcggcggagaactacagccttctgctgatgcaattctccgatgatacggatatgaacagcgccatggtcaaggtgtcgaacaaggtggatcaaaccacggccagcctgccgagcagctgtctgaccccttcgatcatcgagtacagcctgaacatgaacgcctttatgaccgtggccgtcagccgcgagggcagcgatgtgtatgacctgtcggagttcgtcagtgacaccctcgtgccctacgtggagcgcaagggcggcgtttccagtgtgtccaccaacggcctgatcgaaaagatggtgcaggtccagctcagccaggagaagattgacgccatcaacgaaaagctgctggaagtgatcgacgtccagctggccgatgcgcgcaagcagctggagagcgccgaggcccagatcgaagcgggccgcaaggaatacaaccgccagttcaagaattacagcaataccgtttcggataccatgatgcaggagatgagcggccaggtcggcgacgccatcgaggtggtgcgcaaacaggcacaggcccttctggacagcgtgaaccagctcatcgcggtggtgcaggagccggagatccagcaggccctgatcgacgtccgcgacggcctgcagcgggtcatggacaagttcaacgagacgggcatgaaggacattgactccctcatcgagatcgtgaccgagctgcgggatatcaccgataagctgaccggtgcgctgcagcagctgcagcagcgcctgaacaccgagtccggcacggagggcagcacggcggcagatctggccgatgatctgcaggtgcagcagagcctgaacacggtctacaataccctgaacgacgtcatcaaggccatggacgatgtgccgggcctgaccaagaccttctcggacgccatcggcaacttctcgcagcagcagatgcaggcttatatgaagttcaccgaggcccgcgagatgctgaacgagtacgaaaagcagctcgccgaggcaaagcagacctacgcggacgccgaagaaaaggcgatggccagctccgacgtctccaagctgctggacatcgacacgctggcacagctcatctatgcccagaacttctcgatgcccgccggttacgtcaaggattccagcggcaagagctggctgctgaaggtcggcgaggaatacgacagcatcgaggatatctcc

SEQ ID NO: 341 - DNA, 3330 bp, Unknown
  BMI gene
  misc_feature: SEQ ID N?932464
atgggacagactgccgttgcactgaccgaccacggcgttatgtacggctgtgtcgatttttataacgaatgcatcgagaacggaataaagccgatcatcggttgtgaggtgtatgtcgccccgagaacacgctttgacaagagcacaaaagctgatatgaagccgcaccatcttatactgctgtgtaaagataacgagggatataaaaatctttcaaagcttgttactatcggatataccgaaggcttttacaataaaccgagagtggataaggagcttttaagacggtattcggacggacttatctgcctttctgcctgcctttcgggagagcttccgagggtgttgcttgacggcagacttgcggacgctgtaagccttgtcaaagaatataaggatatattcggtgaggattattatatagagcttcaaaaccacggtataagcgagcaggaacgcatactgccgtatcttctgcgtgtggcaagggataccggtacacagcttgtcgccaccaatgatgcgcactatgtcgaaaaggacgacagctatatacagcgtgtgcttacctgcatagcgaccaatacaacgcttaacgacaagagtgatatgcagtttccgacagacgagttttacctcaaaagcgaggacgagatgaaagcgctaggctttccgcagtctgcatatgacaataccgtcaagatagcggaaaagtgcaatgtgaccttcacgttcggtcatacaatactgccgtatttcaaggcggaggggtatgagaacaacgagatatattttaccgggcaggtaagaaaaggacttaaaaaacgctacggcgaccctgtgccggaagaagtgtccgaccgtgcggaatatgaaatgtcggttataaagaaaatgggttttatcgactacttccttatagtagccgactttataggttatgcaaaaagaaacgatattgcagtaggtccgggcagaggctcgggcgcaggaagcgtctgcgcgtactgccttgggattacagatatcgacccgatacgatttaaactgctgttcgagcgtttcttaaatcccgaacgtgtgaccatgcctgattttgatgtagacttttgctatataagacggcaggaggtaattgattacgttgtcagaaagtatggcagggatcatgtggcgcagataatcacgttcggtacaatggcggcgaggggtgctatccgtgatgcaggcagggcaatggggctgccttacggcaaggtcgatacggttgcaaagcttattcctatgtcgatgcactcaaccattgacggtgcgctgaaaagcgaaaaggagattgtgaagctggcttcatcggataatgaggtaagtctgcttatagaaaccgccaggaagatcgagggaatggcgagaaatacctcaatacacgccgcaggtatagttataacccgtgaccccgtagccgattatgtaccgctgtacagaaacggcgagggcgaagttatgacgcagtacacgatgactaccatagagcggctcggactgctgaaaatggactttctcggactgcgttatctgaccgtaatacaggactgctgtaaacttgtgcagaaaaacgatcccgattttgatatagaaaagatacccgaaaatgacagtgcgacctatgatatgatgtcatcgggaggtacgctcggaatattccagtttgaaagtgcgggtatgacctcgcttttatcgcgtatgaagccatgctcgatagaggatcttactgcggcgctgtcgctgtatcgtcccggtcctatggactctataccgacatatctggaaaatcgccgccaccccgaaaggatacgatacaagcacccgcttttaaaggatatacttgacgttacttacggctgtatcgtgtatcaggagcaggtaatgatgatatgccgtgtgcttgcgggatattcattcggcagagcggatatagtccgcagagctatggctaagaaaaagcccgaggttatggaaaaggagcgtgcgacattcgttgagggtgctgtaaaaaataacgttgacaggcaggtcgcagaagagatatttgacgatatgatgagcttcgccagctatgcgttcaacaaatcccatgcggcggcatattcgctacttgcttatcgcaccgcttatctcaggtgtcattattacaaggaatatatggtggcgctgcttacaagcgtgataggctggggcggaaagaacgcagaatatataggcgaccttgcacagcatggacttaagctcctgccacctcatgtaaactacagtgaaacaggcttttcatgcgaaaaggatggtatacgcttcggtatgcttgcaataaggaatgtcggcgcaaatatgatagccgatatcatagaggagagaaataaacgcccgtttaaatcgctgtttgacttctgcgacagaatgtcagataagaatatgaataagcgcgcgcttgaatcgcttataaaatgcggtgcgcttgacggacttggcaacaaccgccgtgaaatgatgatgtcatttgaactgatgcttgacgcactttcacaacggcgtgatattgaaggtcagatggatctgttcggcgacagcgatggagcaaatctgacggggtatccgatacagccgaccgacgagtattcagcggcacagctcctgtcgctcgaaaaggaaatgctcggaatatatatttcgggtcatcctgccgagccatactacaaaatagcaagaaactgcggatacactaatatcggaaatatacttgagcatccgaaggataagcaaaatgtaaagatagtggcattgcttacctcaaagcgcacacatatcacaaaatcaaataaaactatgtgctttgcggcgatagaggatatgagcggcgaaatggaatgtcttgtgtttccgaagctatatgaacagtattcggttatgcttgaaacgggaaaagtatatgcctttgacgggactgtttcggttgaggacgagggcgatccgaagctgctgataaatatgataaccgagcctgatcttgacaagcttcgtaaagcaatgaacggacagggcgcggagcagagcgggaaaaagacactgtatatacgctttgtgtcacggaatgatacaaatattcccgcagtaaaggcattgctcagagcaaataagggtaacactcttactaagatatgctttgacgacacaagggaaaccgttactttgccgccgaacttatccgttgacttaaacagtgattttatacaaaaactgagcgggatctgcggcaaaaacaatataattataaaataa

SEQ ID NO: 342 - DNA, 2118 bp, Unknown
  BMI gene
  misc_feature: SEQ ID N?933417
atgaaaaggataaatataaacgagaacggtatcaacatagtgttcgatattgaggacaacggacagataaagctgatgcacttttcggctctgccgttcaatgaaaacgacatatgggacgagatgtctgaaaaggatcatttaggttgctttgatatagcgcaggttgaaattgcgggacttgaccgtccctgtgagcgccacggaacaaagtacatagtgactgctcctgcctacagactgaaatacaaggacttttccgatacccgtgataatatcggcagacttataaaggtaacgcagtatgacgagccgacaggaatagaggttatcagcacattccgtttctatgacggaataagcatagtgcgcacctatacggaagtgagaaacacctcggctaccgaaacctacacgctgacctatgtttcatcgttcaactatctcggctttgaaaaagagggtattcttccccgtgatgataagtttatcattaagataccgcataactcgtggcagaaggaaatgctgtggcaggactacacctttgaacagctcggtatgccgcagtcgcagaaagacggctgggaacactgcggtaaggcgataagcattactaatatcggcaactggtcgacaaacgaatatctccctatgggttatattcagaacactgaaacaggaaacgggcttttctggcagatagagcacaacggctcgtggcactgggagataagcgaccagagaggtcacttctaccttgcactcagtggacctgatgaacagcagtcgcactggttcaaaaatcttgcgccgggcgaaagctttacatcagttcctgccgcggtaggcgtatgccgcgactttgacgagggtatgggcgagcttacaagataccgcagagctatccgcagaaagaatacggacaacgaaaagcttgccgttatcttcaacgactatatgaattgcctgtggggcgaccctacagaggaaaaggaaatgccgcttataaaagctgccgcagaggcaggctgtgagtactattgtattgactgcggctggtatgcggacggcttctggtgggacagcgtgggcgagtggcaggagaaccgccgccgcttcccgaacggactgaaaaaagtcaccgatgagataagaaaatacggtatgataccgggtgtatggcttgaaatagaggttatgggcataaactgcgagatggcaaagaaagtgccggacgagtggttctttatgcgccacggaaagcgagtatatgaccgttctcgttatcagcttgatttttccaaccccgaggtcagcgcctatgcagacagcgtaattgaccgccttgtaaaagactatggcgtaggttatatcaagatggactacaatatagagccgggaataggcacagaggtaggctgtgacagcgtgggcgagggacttatgcgccacgaaaaggcatatcttgcttggcttgacggcgtgtttgcgcgttatcccgaacttatcatagaaaactgctcgagcggcggtatgagaatagactatgcgatgctcagtcgttattcgatccagtcgacaagcgaccaggacgattacagaagatatgcaacgatagcggcaaacgcaccgacaggactttgccccgagcagagcgctatatggtcatatccgctgacagacggcgacaaggaagaggtcgtgttcaatatggtgaatgcaatgacacagcgtatccatcagagcggacaccttgcaaacctgagccccgagcgaatgtcacttgtaaaggaagcgctcgactgctacaagaatatccgcggcgatatcaaaaattccgtgccgttctggcctttaggtttatctcatatcggcgatgaatgggtcacgctcggacttaaatcgggcgataaagcttatcttgccgtgtggcgcaggcagggcaagagtgattgctgtaatatcccgataaaatacgctacggaaaacgcaaagatacgctgtatctatccgtcttttgacgagggtaagcatacgttcaatccgctgtcaaggtcgctttccgtaaaactgcccgaatgctttaccgcaagactttttgaaatagatctgtga

SEQ ID NO: 343 - DNA, 1125 bp, Eubacterium siraeum
  misc_feature: SEQ ID N?934370
atggatctcaaagagataaggagagagatcgacgcgacagacgatgaaatactgagattgtttctgaagcgtatggatctgtgtgtcggggtcgcaaagtacaagaaagaaaacaatatgcaggtgtttcagggaaagcgcgagcaggaaatactcgagcgtataaagagcgaagcacccgaggatatttccgagggtgcgggacaattgttcacctgtattatggatatatccaagtgcttacagcagaggatacttgctgacgcgccgacacctgagtttgcaaccccgaaaacagaatccataaggatcgcctgcccgggtactgcgggcagcaataccgaagcggcttcggtaaagctgttccccgagtcggagatagacttctatcccgacttttccgatgtgtttgaggcagttgaaagcggtagtgcggattacggcgttcttccgctcgaacacagcacggcgggcgatataaggcagacctacgacctgctcgcaaagtacaatttctatatctgcaagcgcactcagataaagatagatcactgccttgcggcaaagcccggagcggatataaagactatatattcgcatgaacaggctttaaagcagtgcttcggatttttaaaggaaagctccgcaagacaggtgccatacacaaatacggcacttgccgcagaattggtcgcaaacagtgacgataatacggtagcggcgatatgctcggagagatgcgcaaagctgtacggtcttgagatagtaaagcgcggcattgcggacaacccggacaatacaacgcgctttatctgcatatctaagcgcccggaggtcactcccgacgcggatataatctcgatatgtatgtcactgccgcataccacgggctcactgtacagaatgcttatccgttttgcgctgtacggactgaatatcacaaagatagagagtgcgcctgtgcctcaggcaaagcaggatataaagcgggaaacgtttgacgttgtattctacctcgactttgagggaaatgcgcttgatcccgaggtggtaaggcttatgactatacttgaggaagagatgaagtactttaaatttctcggcaactacaagcattttgactga

SEQ ID NO: 344 - DNA, 2097 bp, Unknown
  BMI gene
  misc_feature: SEQ ID N?935356
atgagggctgtcggcgaagtcatgagcatcggcaagacctataaagaggctttccagaaggctatacgttcgcttgaaaaggacagatacggtctcggctttgcaaagaacttccacgatatgactaaggaagagcttttagcacagctcagataccccacaagcgaaaggcagtttgtaatatatgaagctctgcgtaagggcgcaactatcgaagagatccacgctcttacaaagatcaaggactggttcttacagcagatgaaggagctcgttgacgaagaagaatctctgcttaaagcaaagggcgcagttcccgaaaaggctgtactgaagcaggcaaagcttgacggcttctcagaccgttatttaagctcactgcttgaagtaacagaagaagaaataagaaatgcacgtatcggtttcggcataaaggaagcatgggagggtattcatgtaagcggtaccgaaaatgcggcttactactactccacctatcaccttgacgaggataagagccctgtcagtgacaagcctaagataatgattttaggcggcggacccaacagaataggtcagggtatcgagtttgactactgctgtgttcatgcggcacttgctctcaaaaagctcggctttgaatcgatcatcgtaaactgcaaccccgaaacggtttctaccgactatgacacatccgacaagctctactttgagccgctcacccttgaagacgtactttcaatacacgacaaggaaaagccgctcggcgttatagctcagttcggcggacagacaccgctcaaccttgcaagcgacctcaagaagtacggcgtaaacattctcggcacaactcccgaaactatcgaccttgcggaagaccgcgaccacttccgtgcaatgatggacaagctcggtatacccatgcccgaatccggaatggcagtaaacgtagacgaagcgcttgaaatcgcaaaccgcatcggttatcccgttatggttcgtccctcatacgttctcggcggcagaggtatggagatagttcacgatgatgagatgatgaaggtctatatgtctgcggcagtaggcgtaacccccgaccgtcccatactgatagaccgtttcctgcaccacgctacagagtgcgaagcagacgctatttccgacggcacaaactgctttgttcccgctgttatggagcatatcgagcttgcaggtgtgcactccggggactccgcttgtatcctgccctctatgaaccttaccgaaaagcaggttgcaacgatcaaggattatacaaagaagatcgctgttgaaatgaacgtatgcggtcttatgaatatgcagtacgcaatagaagacgacacagtatacgttcttgaagcaaaccccagagcatcacgtacagtaccgctggtatcaaaggtctgcaatataaacatggtacagcttgcaacacagataatcacatcttcactgaccggcaagccctcccccgtaccggagcttcacgacaaggtgataaaccactacggtgtcaaggaagcggtattcccgttcaatatgttccaggaggtcgaccccgttctcggtcctgagatgcgttctacaggcgaggtgctcggtatagcccccacattcggcgaagcttactacaaggcacaggaagcaacacaggtaagacttcctcttgagggcacagttctcctcagcgtatgcgacagagataagcccgaactgctcgatattgcaaggtcgttcagtgagcttggcttccgtatccttgcaacaggcaagagctatgaaatgataaaggaagcaggcattgccgccgagcgtatcaacaagatgtacgagggcagacccaacatcaccgatgcgatagcaaacggcgagatacagcttatcatcaacactcccgcaggcaagacaagcgcaaatgatgacagctatatccgtaagtcggcgatcagacataaagtaccttatatcacgacaatggcagccgcaaaggcaagcattgagggtataaagtcgctcaaaaccaacaagcacttcggcgtaaagtcaatacaggcacaccacgccgatatcaagtaa

SEQ ID NO: 345 - DNA, 618 bp, Faecalibacterium prausnitzii
  misc_feature: SEQ ID N?936472
atgacagagactgctcccatcatcaccgctaaggacctcaacctctggtacggtgatttcaaggcactgaaggatatttcactggatgtgggcgagcgcgagatcactgcgctcatcggcccgtccggctgcggcaagtccacctttctgaaaacactgaaccggatgaacgacctggtccccggcgtccgcatcgagggcgatgtccggctgcgggggcaggatatcttcgcccgcgagatgcagctcaccgaactgcgccgccgggtgggcatggtgttccagaaggccaaccccttccccatgagtatctacgataacatcacctacggccccaagctccacggggtgcacaacaaagccgagcttgacgagctggtggaaagttccctgaagggtgctgccctctggaacgaggtcaaggaccgcctgaaaaagagcgctctgggcctttccggtggccagcagcagcgcctgtgcatcgcacgcgctctggccgtcaagcccgaagtgttgctgatggatgagcccaccagcgccctcgaccccggctccacgatgaaggtcgaagagttgatgagcgagctgaaaaaggactacacggtggtcatcgtcacc

SEQ ID NO: 346 - DNA, 240 bp, Alistipes putredinis
  misc_feature: SEQ ID N?936622
atggatataaagagatcaataaaggctaacggactaactgttaaggaagtggccgaaagaatggggataacgcccgtaggacttagtcaacacattaacggaaacccaagtgtagaggtgctggaacggattgccgccgctattgggtgcgacgtgggcgatttttttgcccctcaaccgacgaacacgatcacctgcccgcattgcggcaaggaaatcaagttaaaccccgaaaagtga

SEQ ID NO: 347 - DNA, 990 bp, Eubacterium siraeum
  misc_feature: SEQ ID N?938652
atgaaaataaaacttatcgccgcggctcttataaccgcactctgcctatccggctgttcatcggcggcaacctcatcgcagtcctctgccgaaggctcgactccgacaacctcatcagcttcgacagctgtaagcaccgacagcacctcatccgagcctgaaaacagctcgaaagatgaaactacagatcccgagagcacagaaacatctgcacccgaaacctcagctgaaaccacagctcccgagagcatagaaacatctgcacccgaaacctcagctgaaacgaccgctcagccagacgaaactgtcgcctccgcacccgagggcggagatacggtaaagcgtatcgattatgagcttgacccgtcaaagccgacaatagcgataacatttgatgacggtccgaatgccaccacaactatggaaatacttgacgtacttgaaaaatatcaggtaagagcatcattcttccttatcggaacgaatataaatgatgaatccgcaaaatcagtaaagcgtgcttatgatctcggctgcgacattgaaaaccattcaaagacacacagttacatggataagatgaccgctgatgagataaaggacgaggtcgcatatgtaaacgacaaggtaaaagagatcacaggtacaaccccaaagttcttccgtccgccgtacatagctgtaaacaatacaatgtatgacaacattgatatgacttttatcagcggatacggttgcaacgactgggaggacagagtgacagcggagtacagagctaagtatcttgagaaaaaagccgcagacggtgtgatcttcctgctccacgatgccgagggcaattcaaagactgtcgaagcactcgacaaggcgatcccgatacttcttgaaaaaggcttccagtttgcaactataagtgagctgtttgagctcaaaggcgtagagatcagcggaacggacaccaatatctactccgagcttaacgcacagtaa

SEQ ID NO: 348 - DNA, 573 bp, Clostridium methylpentosum
  misc_feature: SEQ ID N?939740
gacacgaaaaatcccgacagcaccacatcgggtgaagatagcacaaccggcacgacagaccctgccggtacaacggacacgccggcggcgggcggcaaaacgcttgtcgtgtacttctccggcagcggcaacaccaaacgggtcgcggaagacatcgccgcggcaacgggcggaacgctttttgagcttgttccggtaacaccctacacaagcgccgacctcagctggacgactgcgggcagccgcgtcaaccgcgagcatgatgacgaggcgctgcgcgatattacgctggtcacaacaacgcccgaaaactttgacgaatacgatacggtctttatcggctaccccatctggtggggcatcgcggcatggccggtcaacaacttcgtgaagaacaacgattttgcgggaaagacggtcattccgttcgccacctccgcaagttccggtatgggacagagcggaacgctccttgccgaaatggcgggcacgggcaattggcaggagggacatagattctcttccggcgcaagcaagtccaccgttgaggagtgggtcaacggcttgaaatga

SEQ ID NO: 349 - DNA, 765 bp, Eubacterium siraeum
  misc_feature: SEQ ID N?940643
atgaatgtcggtgaaaacagtcttataacctcggtaattctgcaccttggcactctgcttgcggtatttatagcattctttccgactatatggggaatgataaaggagtttttccttacaataaaggatatattcacaggaaaattctcatggaagaatatgaacgcaaacagacgtatgatgtttatggtcataatctctacggctatgcttgtgccggtgtacttcttcaaagacttttttacaggttttgagggcgataacgatatcatttttgaaggtgcggcactccttttcacggcactgcttctgttcatgtccgataagtgtgtcaaaggcaacaagacgggggataagatgaaggtagccgatgctgttgcagtcggcgctatgcagtgtgtagcgctgttccccggtgtttcgcgctccggttctacaacagcggcaggtcttttctgcggacttacaaaggaaaccgcagttacattctcatttatactcggcatacctgcgatactcggcggcagtgtgcttgaaattggcagtgcgcttaagagtgatattcagcttgattgggttcaactgggcataggctttgcagtttcggcagttgtcggattgcttgctatcgcacttgtaaagtggctcttaaagaaggacagattcaagatcttcggcttctatacagcattactcggtgcggcgtgcatagcggtaggaatatatgagcttgttaccagtacgcgtattatgatcgttatctga

SEQ ID NO: 350 - DNA, 1614 bp, Methanococcus maripaludis
  misc_feature: SEQ ID N?940817
aacattttggaagctctgaatgccattgcggaggcaaacggcaattacttcgggctgcaccgggaactgccgccgagttatagggtgcatatccgcctcgaaaaggaggatgccgaaaaactcttccccggcaaaaacatcgacgagaaatgcgaatttgtcgcctgctccggagaaaacggcaagatagaccgaatcgaatcggagtatctggttccgcttttgagatcggaagtcgacgaaatctccgatcttgcaggcgaattgaaagacgctctcgacacatatacaaggcagctgaacaaaattgcgtacggtgacaacgagcatccgttacggggatttcagatcataaatttcaaaaattcaacgacaaattatgattttctcaaagggcaggctgaaatggtgatccgggaagccgaaaagtttgcgggctttgttaaggcaaatttcgatgccgaagagagttctatgaaattcggatatgtcaattattattatggcttaaatgacccgaaatacctgtccttcaagctccgctatgtaaaacccgatctggcgccgtttgaagaaaaattcattacagtcaacgaaacagcgataaagcgggagatcacgaagatcaacaaggcagcaaaagccgcctgcgataaggtcacggacttgctttatgagctggacgaacgggcgaagcgcttgaaaaatgctttgacttacaacccgatgatgcccgttaatgtcggcgtattctacagcttcatttggaaggtgcaaagatgcgtcggcgcaaaatgcgcttttctgcggaacgaaagcagcaacgtcattttcaaaacggatgatcgtgagcgcgagtatttccgggacgataacacccgcacgatcctgcagacgtatctaggcaaggtctatacaggcgacgataaagatgaacttcaaaagcagatcggcgaaaataaagatttttcgctgcccgacggtgctttgaatgattttgaaaagtccctcaatgagcacattcccgaatttgaaaacggcatgtacgagcgtattgcggttgaacagtccaacggtaaactcccgtcgatactgctgcacgaaaaaagcggtgaaattgttgatctgaattcgacaagcgccggcagacggtggtattttacttactattttatgaagaatacgctcgaaaacggcgacctgtttattattgacgagcctgccgccatgcttcatccccttgcgcagaaagaggttctgaaagagctgctccagcttgaaagccgaggcatcaaggtgatttactcaacgcacagtccgtatcttattccaaacgattggaaaagcgtacacttcgttgcgatgtcagatgttggtacaaccgtcacgcaggaaaacaaatatgatgctctgaagcaagtcaccggcgaagatatatttgacttgcaggcgcttttagaacgatatcaaaaatgcgataaagaagccgtagctcatcaatgctaccatgttattcttggtagttttgaaaacattgacgaagccgcagagaaattaaatctcggtgtgtctgccattgaatcttggagaaaaaacattaatagtaagaaattc

SEQ ID NO: 351 - DNA, 837 bp, Eubacterium siraeum
  misc_feature: SEQ ID N?940884
gtgatttttttgcatgaaaaactggcggcggttataacggcggtgatatttatgtgcggctgtaccgcagaaaaagccacaacaggtcggaactccgggcaaactgacaggggaggtcagacacctgccgaggcggctcttcttgcggacaataccgaaaaagtgtgctatggacaaggatacgaaaccgacaccgaaaatcgtcctgtcggctcgcttcaggctcaggaaaagtacggtgagtatggcggggtatttataggcagcaaggatgacaagacgatatacctcacttttgatgaagggtacgaaaacggctgtacaggtcggatactcgatatcttaaaatcaaagaacgtaaaggctacattctatgttacgcttgactatgtaaagagcagtcccgagcttgtcagccgtatgataaacgagggtcacgaggtaggaaatcacacttgcacacacccgtccttaccggatatcagtaacgaagaagtgattgaagagcttaacggacttcagcgttatgtcagtgaaaacttcggcggatacaggatgagtactatgcgcccgccgcgtggtgagttctcggtaagaacgctcagggcggcaaagaatgcgggatacgccaccgtattgtggtcgtttgcttataacgactggaacgttgacgatcagcccgacagaacaaaggcgtatgaacgcataacctccgcaacgcacaacggtgccatctatcttctccatgcagtgtccgaaaccaacacggcaatacttgccgatgtaattgattactggcaggaaaacggctataccgtcagaagcgtaaaggaataa

SEQ ID NO: 352 - DNA, 945 bp, Eubacterium siraeum
  misc_feature: SEQ ID N?941318
atgaaaaagatatatacaggtaagtcgcttgacgaactcaaggcgcttgctatttcggaaataaaagaactcggtgcaaacgaagccgatataaagatcactgttgtagaagaacccgtaaaaaagcttttcggtaaaaagggcgattacaagatagaagccgaatatgaaatagcagtaagagaagaagctcccgtagcagctacagcagtgcctgctaccgaagcagtagctcctgccgccgctaaagacgcggatcacaccgaaaaggtagctatggctgcggcttatcttgaaaaggttcttaccgctcttggcgttgaggacttcaaggtaaacataatcgaaaaggaagatatcacagttcttgatatagtcggcgaaaagctcggtatcgttatcggcagaagaggcgaaacactcgactctttacagtaccttgcaattcttgcaagcaaccgtcacgatgagccttactgccgtatcacagttgattgcaacggttacagggataagagagaggaaactctcaagtcgcttgcagagcgtaccgctaataaggtgctccgtcagggcagacgcattacccttgaacctatgaatccttatgagcgccgtatcattcacagcaaggtagctgagatcgagggcgtatacagcaattctataggcgaagagccttacagaaaggtcgttatctcggcttctcagccccacagagataataacaagagaaacgatcgcagaggcggcggaagaagaaacggtaacggcggcaaccgctcgtacaagcagagtacaggattttcaacatcgtttgaaagagagtacaagcgctcacagacagctgctgatacaacaacaaatgcagatgcaggcgaattttctaaggaagctgttgaagctgaaagaaacgcaacgctttacggcaagattgagctgtaa

SEQ ID NO: 353 - DNA, 1317 bp, Faecalibacterium prausnitzii
  misc_feature: SEQ ID N?941772
atgcggatcgagatttttattcggtattttttggatttcgcgtcgctgtatcccgccgctgcgatgtgcttcgcgccgataattcgtatgcttgaaaagccgtttactgcggcagtttcggcgtttgcggcgataagtgcggtgtccgccgcttcggcgctgatatgcacggtattttcacttgacagcaaccttttgcttattccggccgcggtgctgttttttgtgctgtattatttgcggctgaaggacaggatatcactcggaaagacggcgttcgtatttttcaccgcgtcgctgcttatgtcggtgtgcgtaatgttgtcggtgatactgaacgctgccgccgaggtggacgatcccgaaacggtgtgccttgcatctacctcgcttatatgccttgtatgcggggcggcggtgtgcgcggtgtactgcgcggtcgcggtgagatgggtaaggtggcttattgagaaattctgctacgagcatatatggcgtgtggtgtgggtgatacccatggggttcacgctactgtatatcatgatagttcccagcgaccccgcgacgatacttgtaaaccgcgtgttcagaatatctgtggtgcttgcggggatatcgttcggcgcttttttcttttcgatattcctgttttaccgcattgcgcgggagtttgtgcggaatattagccttgagcgcgaaaaccgcctgcttgcgatcgaatcgcgaagatacgagcaacttcggggctatatggagcgaagcaggcagcagcggcatgatttccgtcagcacatcagggtgatatcggggcttgcaggttcggacaggacggaggatctgcggcagtacataagcaggtacgaaaaggaactcggcgacgagcgcaccatgttctgtgcaaatgctgcggtggacgccatcgcggggtattacgacctttccgcgagggagagcggggcgaagatagcgtggcggcttatgcttccgcaggagctgcccgacgtgcagtcggatctgtgcatgaccctcggaaaccttgtagaaaacgccgtcactgcggtatgcaagctcccgccggtgcagcgcacggtgacggtgatatgcagacaaataagtcccgcaatgataggcattgtggtggaaaatccgtacaacggcgagataaaccgccgcagcggcggcatattttccgacaagataaaggacacaggcatagggctggcttctgtgagaagcgttgcgaacaaataccacgggcagatgacggtcgaaacagagaacaatattttcagggtgagcattctgctgaatatctga

SEQ ID NO: 354 - DNA, 771 bp, Clostridium leptum
  misc_feature: SEQ ID N?942695
atgactgagatagcaaaagcatttgaaaacaaaaaggcattcatttcctttataacctgcggcgatcctgaccttgaaaccaccgcaaagatagtaagagaagcggtcgctaacggagcggatttaatagagctcggcattccgttctccgatccgacagcggaaggtcctgtaatacaaggggctaatatccgtgcgttaaagggtggggttacgaccgacaaggttttcgacttagtcagagaactgagaaaagacgttgctatccctatggtgtttatgacctatgctaacgttgtattctcatacggtggagacaagttcatttctacctgtaaggagatcggcataaacggacttattctccccgacctgccttacgaagaaaaggaagaatttctgccgctgtgcaggaagtacggcgttgaccttatctcgcttatcgctccgacctcggaaaaccgcattgcaatgattgcaaaggaagcggacggatttatctatcttgtatcaagccttggcgttacgggtacaagaagcgagataaacaccgaccttaagtctattgtcgatgtgattagacagaacacttccgttccctgtgctataggcttcggcatttcaacgcccgcgcaggcaaagaaaatggcggatatcgcagacggcgcaattgtcggctcggctatcatcaagataatcgagcagtacggcaaggacgctccgaggtatgtcggcgagtatgtaaagagcatgaaggacgctataagataa

SEQ ID NO: 355 - DNA, 429 bp, Eubacterium siraeum
  misc_feature: SEQ ID N?942777
atgaagctgtttatgctgttctgcttcggaggcggcgcatacactatagttgagcttctgttccgcggcaacagtcactggacaatgttcatcttaggcgggatctgctttctgcttgtcggtggcataaacgagaaatttgatctctcgctgcccgctcagatggcggtatcatcggtaattatcactgcactcgagtttatctgcggctgtatagtaaacatctggctcgactggaaggtatggaactacgagcaactgccattcaacctctttggtcagatatgcctgctgttcactgtattgtggtttttcctttccgccgtcggaattttcaccgatgatattctccgctggaaaatgttttgcgaggaaaagccacgctaccgcctgatcccaaagaacgtaaaaggaaagccttcggcataa

SEQ ID NO: 356 - DNA, 1098 bp, Eubacterium siraeum
  misc_feature: SEQ ID N?943861
gcacttgttgcaggtgcaaaatacagaggcgaatttgaggaaagacttaaagcggtattgcagaccataaagaagtcagagggtcagataatactgttcatagatgagcttcatactatagtcggtgcaggcaagacagacggcgcgatggacgcaggcaacctgctgaagcccctgcttgcaagaggtgagcttcactgcataggtgcaacaacgctcaacgagtacaggcagtacatcgaaaaggatgccgctcttgaaagacgtttccagccggttatggtaaacgagcctacagtcgaggatacaatatcgatactgcgtggcctaaaggaacgttacgaggtattccacggcgttaaaattcacgactcggcgcttattgccgccgctactttatcagacagatatatctctgatagatttttacccgataaggcgatcgaccttgtagatgaagcgtgtgcgcttatcaagaccgaaatggaatctatgccgtccgagcttgatgatatccgcagaaagataatgcagcatgagatagaagaagccgcacttaaaaaggaaaccgaccgtatctcagttgaacatcttgccgaggtacagcaggagcttgccgaaatgcgttcaaagttcaacgagatgaaggcaaagtgggagaacgagcgtaacgctatttcaaaggtacaaaagctccgtgaagaaattgaaagcaccaacggcctaatcgagcaggccgaaagaagctatgatttgaacaaagccgctgagcttaaatacggcaagctccctcagttgcaaaaagagctggaggaagaagaaaagctcgcagagcagtcaaaatctgcgtctatgctgcacgataaggtaacagaggaagagatcgcgaaaattatctgccgctggacaggtatccctgtcgcaaagctgatggagggcgagcgtgaaaaactgctccatatggaagatatacttcataagcgtgtaataggtcaggacgaagccgttgaaaaggtaagcgaggctatactgcgttcaagggcaggtatcgcaaatcccgatcagcctataggttcgttcctgttcttaggtcctacc

SEQ ID NO: 357 - DNA, 459 bp, Alistipes putredinis
  misc_feature: SEQ ID N?943984
tcgctgaccttcgtgggcgccatgctgatgctcacggcgcagctgctgaccttcgcctatttcgccaagccccgcgcgaaaaagggaatcacctacggcaacgccttcgtcatcggcctcgcgcaggccgcggccacgctccccggcctttcgcggtcgggatcgactatcgccgcgggactgctgctcggcaaaagcaaggaggaggtcgccaacttctcgttcatcatggtcatcccggtcatcctgggcaagatgctgctggacatctgttcgggcgaggtcacggccctcgacatcccggcgggagccctcgccggcggattcctcgcggctttcgtctcgggaacgctggcctgcaaattcatgatcgaagtggtcaagcgcggcaagctgatctggttcgccctctactgctgtttcgcaggactcgtctcgatcctcttctccatcttctga

SEQ ID NO: 358 - DNA, 663 bp, Unknown
  BMI gene
  misc_feature: SEQ ID N?945128
gtgacagatatggatatggataaattattcgatatcgccggtaaaaaagtaattgtgaccggcggcagccgtggtttgggcaagggcatggcaaagggctttcatgatgcaggctgcgaggttgtcatcatgggtaccaacgaaaaagtaaaagcgaccgcagaggagctttcgacagaggataacaaggtgcacgcagtgatctgcgatttctccaataccaccgatgtggaaagagccttctacgaagccatcgatttcctcggcggcgatctggacgtattggtcaacaatgccggtacgcagatccgtcatccggcagcagaattcccgctggaggactggcagaaggtattgaacattaacctgactgcggcgttcattctgacacagcttgcaggcaagatcatgctgccgaaaggctacggcaagattattaacacagcttccttgattacgttcagcggcggcatgttcattccggcatacgcggcagcgaagggcggtatcggtcagatcaccaagtccttctgcaacgaatgggcctccaagggcatcaacgtcaacgcgatcgcaccgggctacatggcgaccgacaacctcaagggtttggacgatgaaagaatgcggaccattatggacagactgcctgtgcagagactg

SEQ ID NO: 359 - DNA, 570 bp, Faecalibacterium prausnitzii
  misc_feature: SEQ ID N?945475
atgggacgtgctctgatcgtcagcgccggagccagctcaaacgagtatatctcggcacggctggcggagctgggatacccccggcctctgatcgtgccaagcggagccgaggcccggcgcaggatgttagaatcggattttgagctcatcgtggtcaacgcgccgctgcccgatgagtttggccatgagctgtgcgctgccgccgtggaaaagaccgacgcgggcgtggtgcttctggccaaggccgctgcggccgatcagctgctgggttccatgagcgacgagggtgtgctgcttttgagcaagccgttctcgaacacgctgtttttgcaggccatccacatggcagcagccagcaaccaccgcctgctgcgcctgcggcaggaaaacgccaggatgcaggaaaagatcgcgcaggtgcgtctggtcagccgcgccaaatgctgcctcatcgagcgggaaggcatgaccgaggccgatgcccaccgcctgatcgaaaagcgggccatggacacccggcgcgaccgtgccgagattgcacaagaaatccttgattcttacgaggattag

SEQ ID NO: 360 - DNA, 846 bp, Faecalibacterium prausnitzii
  misc_feature: SEQ ID N?946374
atggtatactcattccgtatcatctccggtatcatgaaaataaaggatgtggaacccatggacgcactggacaaagcccgccgggagatcgacacggtggacgctgcgctggccgcgctgttcgagcggcggatggcagctgtgctggcggtcgccgaatacaaaaaggcccacggcctgccgatcttcgatgccgcgcgggaagccgtggtgctggacaaagccgaagcgcgcattcaggaccctgccctgcgcccctattaccgcgaccacgtacagcacatgatggatgtggccaagcagtacgaggccgaggtgctgggccggaaccgcgccgcctatcagggcgtggagggagcctttgcacacatcgcgctcaaggcgctcttcccccatgcggaggcggtcagctaccccacctgggacgaggtcttcgacgcggtggaacgcggcgatgcagcccatggcgtggtcccctttgagaacagccacgcgggcgatgtgtccgccgtgctggatctgtgctacgaccaccccgccctgtgggtcgtggatgtgtacgacctgcccatctcgcagaacctgctggtcctgcccggcaccccgctgagcgagctgaagcatgtgtacagccaccagcaggccattgcccagagcgagaccttcttaaaacagttccgcctgccggccacggccatgcccaacacggccatggcggccaagttcgtggccgagagcggcgaccggacgcaggcggccatcgccagcgtggaaacggcggcgctgtacgggctggaagttctggtgcccagcatcaacaccgatggcgacaacaccacccggttc

SEQ ID NO: 361 - DNA, 1179 bp, Eubacterium siraeum
  misc_feature: SEQ ID N?949511
atgcttcagaacagctacgacaattacacacagaagccgcagctcaatgctaagctgaaagtgctcagaaagataatcgcatttgtgtttgcgataaatatgctgatcaccagattcttcggcggacctgcaggcactcagctcagacaagctgaggtgtttacagacagttctgcttcgcagacatatgtgaccgacagtgtttacagcaccgatttaccttcgattttatcagcggaggattttgacacttcggtaaccgccagccagtcttctgtatacaataatctcgtcggagatgtttataacgacgtattcggctatgctgcaggctttactctgtttacagagggagatgcaactattacgcaggccgattgcggcggcagaatagctacaggcggcgatcttaacgttaccgcaaacggcggttggtatgaggtaaacagagaggactctaatcgtaatgacaaaaacggatatgcctctgttatagtcggcggaactgccaacataaagatgaattccggaaatttatgggcaaacaatctcggagatgtcaatcagtatgcaaacggtacaacagtggttggcggtgttaacagcgatgaatgcaaatttaattttgcagacacgtttgcatatctacgagcatcatctgctcatcttgcaagtcttcagtctaccggcgtatatgacggcggttacggaaacttgaatctcaccggttatgaaagcggcgttaatgtctttacatttgatatttatcagtggaaccagatgacaggaaacggaccgattaaccttaatatcaatgtacctgacggcgctacagtacttatcaatataacaggtgggcagggtgatcagaacaccagactcaatcttactttacaatcacttcaaatcaacagaaagcaagttaacacaacagaaaagtataaaaatctgttgtttaatatcactgatgcaagtgttgttgatatgtacggctttaacggtgctattctggctccgaattcaaatgttaacggtcttgaaaatcgacatcacgaaggtcaggtagtgtgcaagtcctattatggtagccttgagttcggtaataacccgttcgatccgcctgttgacgatgatgatttcgactacggcgatgatgacacggataccgacacagacaca

SEQ ID NO: 362 - DNA, 1041 bp, Eubacterium siraeum
  misc_feature: SEQ ID N?949649
atgactaataaagataaggtgacctttttgaaaacagagataaagaagccgtcttacgaggtattatgcgaggcggcagagcttataaagaagggtgaggtcgtggcgataccgaccgaaacggtatacgggcttgcggcagacgcatataaccctgaagcgtgcgcaaagatattcaaagcgaaaggcagaccgcaggacaatccgctgattatccacatctgcgaccttgatatgctgaaaaattcggtaaaggagattcccccgcttgcgcttacccttgccgagcatttctggagcggttcgctgacgatgatcttcccgaagaaagatatagttcccgatacgactagcggaggacttgataccgttgcggtacgaatgcccgacaacgaggatacacttaatcttataaagatgtgcggtgtacctcttgccgcaccgtccgcaaatctgtcgggcagtcccagtccgacaacagcacagcacgtctatgccgatatgaacggcagaataccgctgataatagacggcggcgaatgcaaaaacggtgtcgaaagcacagttatctgctttaccgatggcggaaaagggataaaggtgttaagacccggtgttattaccgctgagatgctcagccgttttgcaaaggcagaaaccgacaagaatgtatttgcaaaacccgacgaaaacgaaaaggtaatttcacccggcgttaagtacaagcattattcgcctaaagctgacataactattgtagaaacggatagcgatgagaaactcgccgagtttctgaatgataaaaatgacggcagcacttacggtgttattttcggtaacgaaacaggcattgaaataccgaccatatcctatggaaatacagcatatgagcaggcacacaacctgtttgccgtactgcgcaagaccgatgaactcggagcaaagtgcgcttatgtacgctgtcccgaaaagaccggtgtaggaacggctgtatataacagactgctccgtgcggcggcattcaagactattatactttaa

SEQ ID NO: 363 - DNA, 900 bp, Eubacterium siraeum
  misc_feature: SEQ ID N?949751
aaatgctgtataataatacagtatgattgcgaggtgtgtgttttggcacaaaagaaaaaaggaaaaaataagttcgggataacaccgtcaatgatatttatgaacctgctattggttcttatcatatgcacagtgtgtttctttacctataatataattaacggagaagacggcacatcatcagaaccgcctttcacagcagttacatccgaaccacctgaaactgaagctcccgctacagattcagatataagctctgcccccgaaagcacggcttctgtcgaagagtcatccggcacggcttctgatacatcaacggataatcaacctacaatagattttgataaggagtatttctcatcatcgctgtttatcggtgacagtatctcgacaggtcttagtctttacggtttccttgatcaggataacgtttttgctcagcagggtcttgcaccttctacagcacttgacgctgagatagacggagttacgctatcggataagattgctgcattcaagcctaagaagatattcgttatgctcggcacgaacagtgtcggatatgccgataacgaaactcttgcggcaagtatgaatgagctggttgagaagatatcaggtcttacaaaggcaaagatctatgtaatatcaatcccgccgataacacccgaagcggagcaatctgatgaaaacgagctgacaaagaaagatatcgatgactacaacgcaaagctcaagaccgctgtttcaggcagtggagcttcatttatagatcttaacagtgtgctgtcaaattcggatggatattttgatgcggattatgccgagatggacggtattcactttatgggtacgacatatgaagtgatgttgagctatttgcagaagcattcgtcttaa

SEQ ID NO: 364 - DNA, 843 bp, Unknown
  BMI gene
  misc_feature: SEQ ID N?950385
acgctggacgacgaaccgatcgagatcaaggtggtggcgtcgcaggttgcggcgtcgaatctgaatatcggattcacggtcggcggtacggccacgacggccgattacgagctttccgcgcagagcttcctgctcgaagccggcaagaccgaggcgaccgtcaccgtaacgcccaagcaggcttacaaggaggccaagaccctgacgttcaaccttgctgccggtaagggatatgtgatcgggcgggtcgcttccacgacggtaaatctggtcgagtcgagcgtttatgtttacagcttcacgacggcggctgcagaattgcaggagtcgctggatgttacgctgaccgtgggcgacgagaacttcaaggcgcctaaggatctcgaattgccgttcaaggtcctttcgggctcgacggccgagttgggcaagcacttcctggtgaaggacgaagccacctctttcatcgttccgaaagacggcaacacggcgacgctgacgctgcttccgggtcccgatgctgacctagccaatcccgcgacgctgaagctcggcgtggatgagcagggcggacgcttcgtcgccggagagaccgcgagcgtaaccgtcacggtcaaggggctgctctcctatgcggctcttgccggcacgtggcattgcaaggagctgatcggtctggagatgctcgaactcttcgctatggacgaggatttggatacctcgaaggttccgagcaataacgatgacttcacgattacgattacagccgggggcgagagcgcgaaattcactccgtcgagcacgggcgatctggccaatctcttccggacgtgcgacatgacc

SEQ ID NO: 365 - DNA, 1347 bp, Eubacterium siraeum
  misc_feature: SEQ ID N?951511
atggctgacataaccgaaagagataagaataacctgtgggcggaaatgccgccgtcaggcaagaagcgcttacagcaggaaaattcacagccgaaacccgcacccgaaaatacgcccgacaataaaaagggtaaaaagaaaaaatcaaaacccaataacaaaaagagcgcaaaaaagcagaaggataaaaagagcaatgccgctgaaaaaacggcagaacgaccggagaaagacgtaaacgcagataacggtacggcatctaaagcacagcgtatgccgcagtttctcagcgaaaacacaaggaccgacattcctgtcgtaaagcctgtggatatccagaaccgcgttcttcgcaacaagccaaggtcaaaggaagacatacgcgaaaggaaacgcagaaagcgcctttctgcctatatcgtatattatattatattcggcatactggcagtggtaatactgacagtgctgtcaacgaccgtattatttaatctttctaagtacaggataacaggcgacacggtgtacaccgaacagcagataatcgatgcagcgggagtcaatgtcggcgacaacctgatacttatggacgcgggcgcggtaaaggacagactgatagcggcacttccgtatgtagataaggttgaagtcagccgcaacattttcacctgcgcacttgaaattaagctcaatcccgcaactgcggtggcaaatgtcaaaaagaatgaccgctactatcttgtcagcgaaaacggcagaataatggacgcggagctgaaagctcccgataagaactgtgtcgttgtactcggatttgaccccgaatacgcaaagtcgggcgattttctgtccgtgaccgatgagggaagccgtaatatgcttacaaagcttctcagagcggtaaagacgtatgatgaaatagacgatgaaaacgagtatgaggcacagaagaagtacgactgcgtgttcgcacttatcgagctttgcaaagagcttgacatcagcggacatatcaagacgatagatatatcaagcatatacggcataaagctgaactatgataataagcttactcttgagctcggtgatatgaccgatgcaaagctaaagctcacggtaggcaagaaccttatagataagggcgaatttgacggagaaaagggcgtgcttgtcctgtcacagctcagtgaaaacacatataatatgaaggtgacattcagacccgagtatgatgacacaagtaaggatgacacaagcagcagcgagcctgagccgacacccgacactcccgataacagcgaacccgtgccgggcgatacgacagaaccgtccgaatctgccgaataa

SEQ ID NO: 366 - DNA, 138 bp, Unknown
  BMI gene
  misc_feature: SEQ ID N?953454
acagactttttctacaagctgatccgcctgcacacacaggcggatttgtttatttcctatattgacacagatgagttagtcgtgtataatcaaaattggagtaaacaagaaggagaaagaaaatatgatgatacttaa

SEQ ID NO: 367 - DNA, 360 bp, Unknown
  BMI gene
  misc_feature: SEQ ID N?954390
atgaatacttggaaaaaagctggagcattatttttcacaggagtatttgcttttggaatgtgtatgggagtgtcggcagaagaacagacggatgtggtggtatttgcagcagcatccatgacagagacactgacagagattcaggaaatgtacaaagaggtggagccaaatgtaaatctggtatttacatttgattcttcaggaaccttaaagactcagattgaagaaggcgcagattgtgacctgtttatctcagcggcacagaagcagatgaatcagctggatatcacagcagatccttctgtgaatgaagatgggctggattttgttgatgatgctaccagaatcaatcttctggaa

SEQ ID NO: 368 - DNA, 3996 bp, Unknown
  BMI gene
  misc_feature: SEQ ID N?957601
atgccggtacagacggctgtgtggagaataaattacaacactaataagtcaacgaattcttatggaggtatcaataaggatgtacattttgaattagaagtatctgatgtcgtggtatttacccatgctggttctaaacttacggatacttctatgtatttactacaacatcttcctaatggtgaggttgaagaaatttccagttcccatagtaatatcggcatatcgataactcagggatctttgaaaaataccgatttaggaaatctcattgaagaagatttgaaacagatgactcccaaacaggcatctatgcgtggattattcccggaaagtgtgtatgaattagtcagtgaaggaacgggtgatactggtcttaataatggagatatacgcttaaatgtatatgctgtaatttctaatcgtgatactataaaagttggaaaaatagacagagaaatgacttttatacattcaataaaaaaagaatcctcttcaaaaattcatcggtattttaagcttgaagtaacacgtcctgtgattgtggatattgcgatggagactcagtgggatacccaagttgaattatctatttcatcaacaaaaggagggaatatagaaggtaatattacaggtccgtttcataatctctttttatctcccggcgtctattacgtgcttgagaattatcgtgctatagctagtacccaggtagctcttgctattcatgttgttcctgtagaggaagaaccggaatgtccagtagaaatgtctccgtatactcccaatacttctcatagctacataacctccatagtgcctgtcatggcgcagactacgccagattcacttcgttatcccggtaaggccattcactccataaattattatgatggtttaggccgtccggaacagactgtgcaatatggcgcttcgcccgatggaaagaaagactgggtaagtcgcactgcttatgacggattaggccgtgaacatcaacaatggctcccctcttctgtatcccgtagtttcggatatacttcaactaattctttggaggacatttcggctactcaatacaatgaccgttatgcttataatcgaatggtttatgaaggttctcctttggaacgcgtcgtagaacgttatggtcccggtgaagcttggcaagtgggcgggcatgccgtgaagtccgcctatcgcttcaatcagactgctgataattgtttgttttttatagttggcggtacccgggagaatcctgtgctggtacataaggggttttattctccaaacctgctcgatgtgacgcggactactgatgaggatggtaatcggagcgaggtatttactgataaggaagggcataaggtattggaacgtcgtttcctttcctccattgctactgtttccgtgtcttctgatacttattatgtatatgatgagtatggtaacctttgttttgtgctctctccggaagcgtcggcacgctatatcaccaatcccattaccgcattggaactgtatgcctaccagtatcgttacgactatcgtaaccgctgtacggggaagaaacttcccggcgcaggctggaatagttatatttacgatgctgccgaccgattggtgttcagtcgcaatagcgaacaggcaaaacgtggtgagtggctttgtaacttatcagatatttatggtaatctggtaataagtggaatctacactgccagtgtttctgttgatgccatcaacaggcttaatgtgacagctacttttataggcaagaacactgattattatggttattcactcccttcttccttcttaacgttaaacaagttcacgccccaagaagtgcattattatgatgattatcgttacaaacaatgcagttcgaagacatttcctacttcactcggctatgtggtaaagtctggttatcctgtccgttttggtagtgactcagatagggttgtacataaaggaagggaaacgggaagcttggttcgtgaactgggcggcagcgatggatggatatttaccagtttttattatgactattatggtcgtcccatccagacgcgcagttcttgtttgggacgtacttctgtacagcatcaagcttataacttttctggtgctgtcacttccgattgtttggagcaaacaagcatatctccttttgaaaaaaaatatgtttatgaccatatgggccgcttaactaatgaacaacatatttttgacggttctactactgatttcttgtttgattatgatgatttgggacgcttacatcgtctgtgtcgcaagtgtggaaacgatacgttgagtacaactaacagttataatattcgtaattggcttacgaacatccataattctgctttcagccagagtttatactatactggtgggaaaggtacgccttgttataacggcaatatcagtagcatgacatgcaagggaaatgatagagtgacacgaggatataagtttacttatgatggagtgagccgtatgacagatgctacctatggggaaggcgatctgataaatgccaatccgaaccgtttcacggagcaagtgaccagttatgacaagaatggaaatatcctgggtttgaagcgttatgggcagacaggtgcttcgtcttatggcttgattgataatcttgccctgactttgaacggcaaccagctaaaagctgtgaatgatgcagttacgacttctgcttataataatggctttgagttcaaggatggtgccaaggtgactactgaatatacttatgatacaaatgggaatttgacgaaagatttgaataaaaatattatttctattcaatataatatgctaaatttgccaagtatagtaagtttttccgatggcagtactattacctatacttatggtgctgacggtacgaaactcaggactgtgcataagataggtagcgcaatcacgactactgattatttaggcaatgtggtctatgaaaatggtgttgccaagttgcttctgactggctacggttatgtttctttgaatgacaaaaagtatcattattatttgcaggatcatcagggaaacaatcgcgtggtagtagattcatccgggaaggtagaagaaacgaaccattattatcctttcggaggtgcatttgcaagtaccggtaatgtacaaccttataagtataatggtaaggaactggatgcgaagaaaggattgaattggtatgattatggggcgagaatgtatgatccgacgttgggaaggtggcatagggtagacccgttggcggagaaatactatggtataactccgtataattattgctttgataatcctatcaagtatattgatcctgatggttttcaacctcgtcctgcccgcccagtacgaagagggtatagaaatggtggtcgtcctaatccttatgccttttatcctggagaggttagacctcaatcttatagggaaactacaaacttttcttatcgaggtacgggattacgacgacaagttcctttggaagaacaacgttatttgcaggtgacaaatacacctggagggaatgaagtgcaaatgagtagtggaaataaatgggggcaaagtttgtcaggagctttagatttaactgatagatatatagattttagaaatcgcttagtaagccttgctactacagtgaaatatagtgagaatggcatagttcaaaaaagtcttgagatgattattaatgatccagaattagcacagaagcaacttgactatgaagctcaagcaagaaagatagacgaagagttaggcaaactggattttacagggaagtcattggcagaaattcttgagatatctgcagaacgcaaagatataatacaggaaagactcggcttgtctcccaaggatattttatggaatgagtttcttacgaaccctgaagcgtttcaaacagtaggaaccaatagaagggtattaccggaatttagacaacactaa

SEQ ID NO: 369 - DNA, 144 bp, Unknown
  BMI gene
  misc_feature: SEQ ID N?967219
aagctgcgttcagcgcactccgaacgactctcccaacaaatacaagcaaagaccagccgccaggcgcccgccaaagaacagacgttttaccgcatgcaaaagacggaaaccgcagggtttccgtcttttgcattttcgacctaa

SEQ ID NO: 370 - DNA, 228 bp, Unknown
  BMI gene
  misc_feature: SEQ ID N?971723
gcacagaaagaggacgaaatgccaaaaatgaaaacacacaagtctgctgcaaaacgctataaagttactgcaacaggcaaaatcgttagaagacaggctggtataggtcacttacttcaacacaaatctgcttccagaaaacgcagaattttcaaaatgatttcaatttccgaatcacacttcaaattgatttcaaaagagttaccgtacaggaaatattctagatag

SEQ ID NO: 371 - DNA, 1206 bp, Unknown
  BMI gene
  misc_feature: SEQ ID N?971738
attaccgttccggatacctatcgcggaaaaccggttacgagcatcggtgaaaaagcgtttcataacaaaaggctgacaagcgtcgttttaggaaaaaacatcacgaatatcgcggcggaggcgttcagcaattgttcctatcttgaatctatcaatattccggacaaagttgtgaacatcggtgaaaaggcgtttcaaagctgccggacattaacgtccatcgttttgcccgatggggtgacggagatcaaggcaaacacctttcagtcctgtatcaatctggaaagtttgcctttgggcgatcatgtgacgtcaatcggcgaaaatgccttttacaactgcagaaaactcgaatccttcgtcattccggatacggtgctggcggtaggcaataacgctttctccgcttgcgaaatgttgaaaagcgtcactattgggcgcaacgtccgttctctcggcagcgaggctttccgttcagacagcgtgctgtccgaagtaattttcaaaaatgacagcgccttaagcgaaatcggttcttatgcttttgccgagtgcggaagtttgacttcgattgatttgcctgcagaagtgacgagtatcggcgaatatgcattctataattgtgctgagctttctgagattgtgattggcaacaacattgagcagatcggaatgcgcgcttttgagggaactgcatatttgaacaatgcagcggacacgctcgtttatctgaacggttggttaattgccgtaaacgatcgggagattactgccgtagacatccgggaagacacggtgggaatcagcggtgccgctttctacagatgtaatcaaatcatgcaaattattctgccggacagcgtcaaggttatcgaggattatgcgttctatggatgtgagagcctgatgcaggtagtaatcggcagcggcgtggagcgcatcggctggcaggctttttacaattgtaaaaaactcgctacagtcatattgggttcttatgactttgatcttcacgaaatgacggggagcagtttaaaaacaatcgattcgtatgcttttatgggatgcgagttattaaaagatatcgaaattccggataccgttgaatcgatcgggtcgtatgcattccgtaattccggcttatataataacgccgtcggcggcgtagtctatgctgggaactggttagtagattgtaacaacaat

SEQ ID NO: 372 - DNA, 606 bp, Roseburia inulinivorans
  misc_feature: SEQ ID N?973942
atgacttatcaagacatcttcaaaagatacgagctgaaatttctcataaccgacgagcagttgaaacggatgcaggaagttatgcgcgaacccgtcgagagcgatagattcggcaggagtgcgatctgcaatctttattacgatacgccggattttcttctgatccggcgttcgctggataagcctttttataaagaaaaactgcgcgtccgaagttacggcgtggcgagttccgaaagcaccgtctttgcggaactgaagaagaaatatgatggcatcgtctataaacgcagaatttccatgacggaaagtcagtcagtagaatttttacaggggcgtcttcccccgcaatcgcagatttcaagagaaattgcttatatgttcgagtattataaaatgctcgctccggccgttcatctctcgtacaagcgggaggcgttttacggaaaggaagataaaaacctgcgcatcacctttgacagtgaaattctttacaggacttacgatttgagtctgcaaaaagggatttacggatcgcctatactgtcggacggaacatatttaatggagataaaaaccgcaacggcgattcccctgtggcttacg

SEQ ID NO: 373 - DNA, 681 bp, Unknown
  BMI gene
  misc_feature: SEQ ID N?976902
ttgattctggaagatgaggtcagcattcgcagttttgttgtgatcaatctcaaccgcgcgggctacgaggtcatcgaggccgggacgggcatggaggcgctggagaagctcaaggagcagaagcgcgttgtgcagggctatgtcatggatgaaatctacaacaagatggagaacggctccgccgccattgcctcctactacgccggggacttcatgaccatgtacgaggagaatgaggatctggagttctactacccgtccgaggggaccaacctgtacgttgacgccatgtgcatccccacctccgccaagaacaagctgattgccgagcggtacatcgacttcatgctgacggaggaacccgccgtcgccaacgccgagtatacttactacggctcccccaaccggctggtgcgggagaacgaggagtacattgagtacatgaacagcatcaaggacggcggcttcgacctcatgtacgacaccgacaacgtccatgcgaccgcctacgagaatctcacccccgaaaagctggcgctcctgaatcagctttgggaggagctgaagtcggacatcgacatcagcacgggcatctacgtaatctgcggtgtgatcatcgccgtgatggctggcttcggtgtgtgcttcgccgtgcgcaggaaaatccgcaatatttattga

SEQ ID NO: 374 - DNA, 342 bp, Anaerotruncus colihominis
  misc_feature: SEQ ID N?978507
atgcagaagtgttacgatataacgcctctgtgttggcaaacgggagttttgtcgctttcgagtacctatgatatcatttctgtgaaggagggaagaaaagtgccaagaagaggttcgatagctaaacgtgatgttttagcagatccaatgtataattcaaaattagttactcgtcttattaataacgttatgtacgacggtaaacgcggagtttctcaaaaaatcgtttacggtgcattcgatattataagagaaaaaaccggaaaagaaccgttggaagtttttgagcaagctatggaaaatatcatgccagttctcgaagtaaaggcaagacgtatcggt

SEQ ID NO: 375 - DNA, 282 bp, Unknown
  BMI gene
  misc_feature: SEQ ID N?978945
gtgccaaatattaaatccgcgaaaaagcgcgtattagtcaacgagaagaagaatgaagagaataaaatgatcaagtcttctgtgaaaaccgcgatgaaaaaaattgaggcgctgattaaagagggaaaaatcgaagaggcgaaagcgcttctccccgaaacgttcaaagtgatcgacagcgcctgctcgaaaggcgtaatccataaaaacaacgcggcaaacaagaaagctaaaagtgccaaaaaactgaacgtccccgcgcagacggaagcgaccgcttaa

SEQ ID NO: 376 - DNA, 312 bp, Unknown
  BMI gene
  misc_feature: SEQ ID N?979183
atgtactacgctttgccggaaacctgctttctgtgttttttgccgttgctttgcgccgcgctgcctacccgtgcaacgggtgaagagccggcgctttttcgcgcctccctgatgtataacgctaccaccaacgcggcgggcagcacgatcctgtccaccgactgcggcgacccggcggatccgccgtgggaatatgcaatggcgcaatatcttcacgagatggaggagcacggcgtgagccgcgatgcactgcgcagcatgacgccgaccctgcccgcacagctgctgggccttgaggatgcggcggagtag

SEQ ID NO: 377 - DNA, 1068 bp, Unknown
  BMI gene
  misc_feature: SEQ ID N?980554
tacatagaggagattgctcaacatgaggagaagaataaggagggagtgttcaccaacactggagcgttcgaggtagatacaggaatctacactggtcgttctcctcaggataagtatttcgtggagagagagcctagcaagagcaacatttggtggagtccgattcctcccaacaagcctgtttctgagaaagtgttcaatgaggtgtatggtgatgtgagaaagtacatggatggaaaggaggtgtatgtgttcgatggatattgtggagccaaccctaagagtcggaagtgtgtgcgtttcatcactgagtatgcttggcaacatcactttgtgacgaatatgtttgtgcgtcctcagtctgctgaggagctgcgtaacttcaagccagacttcactgtgatcaacacttgcaagggtctggtgaacaagaactggaagcgtcagggtctgaacagcgaggcatttgttggtttcgatctggagaataaggtggctctggtagtgggtgccaagtatggtggcgagatgaagaagggtatatttggtgtgatgaactatgctcttcctcttcagggtattctgtcgatgcattgttcagcaaatgtgggtaaggatggagacagtgctctgttctttggtttgtctggtactggaaagactacattgtctgcagatcctaagcgattcctcattggtgatgatgaacatggatgggatgatgatggtattttcaacttcgagggtggttgttatgccaagacgatcaatctgtcgaaggagaaggagcctgatatttggaatgccattaagcgagatgctctgttggagaatgtgatggttcgtcctgatggttctcttgactttgatgatgtgagcaagactcagaatggtcgtgtggcttatcctatctatcatattcccaactacaagaagaacagtatggcaggtcatcctaaggccatcatcttcctgacatgtgatgcttatggtgtgttgcctcctatcagcaagctgaccactgagcaggccatgtatcacttcctctgtggatacactgctaaggtc

SEQ ID NO: 378 - DNA, 186 bp, Anaerofustis stercorihominis
  misc_feature: SEQ ID N?981538
atgaagaaaaccgtttacagcctggtgctggatgacgaaatcgtggaaaaggtggatctgctcgcataccggcgggggatctcccgctctcagatgatcaaccgcattctggcggaacgcgtttcgcacgagacgcccgaacagcggatggagacggtctttcaggcgctggaacagctttccgcc

SEQ ID NO: 379 - DNA, 105 bp, Unknown
  BMI gene
  misc_feature: SEQ ID N?981673
ggcggacaaagaacgctgatctctgtgagatgcgggggaaccctggaggactgcgttatcttagcaagcagactgtttgtatccccaaaaggctacaaacagtaa

SEQ ID NO: 380 - DNA, 603 bp, Unknown
  BMI gene
  misc_feature: SEQ ID N?983563
tttaaagagaccgaaaaggcagctgtgttcgcgcgttcggcggggttcgatccctatgacctcgcgcagtggagcgcaatcacggccgtgtataaggatctgacgacggataccgagcccagaaacgcgatgagcgcggcgatggagaagctgaccaacgacaccggcagaaacgacatcagcgaagtacgcgtcgcgtcggatgatgaaaacgtctatttcctgattcagacggttgcggatatcacggaaaaagaagccgacgatgcgcattggatgaatctgtatatcggcgtcgacggaaaagagggcggatggaacggcctgcattacgtggtgaaccgttcgctttccggcacggaagcctctctgtcccgcatacaagacggaatctataccgatgtcgccaaggcaaaaacagaagtcagcggcaatctgatgctggttacggtgaaaaagagcgacctggggattacgggagcttgttcgctgcaattcaaagtgtgcgataacttgcaaaaggacttcgatatcaccgatctctacgtaaacggcgactgtgccccgctcggaagaatcaactacgtttattcggcggaataa

SEQ ID NO: 381 - DNA, 651 bp, Bifidobacterium adolescentis
  misc_feature: SEQ ID N?983987
ttcaaggagatgtttcccaacgtcacagttgagattacgcggattacgggcagcaattacataacggacgtagataaactggtcaagctcgaaaagctccccgatatcatttatacgagcgaaacggaatctttcagctttatttccagcggctatttcctgaatctgaaaccttacatcaacgcgatgaaagcgaacgatccctcctatgaagagcagttcgtcgcggaagcctggaagatggggcagaagaattacgacggtgatcagtatgtgattccgcgttcttccgaccgcatcgtcactcatctgaacaaaacttatacggatgccgcgatcgagtattggaacgaaacctatccggacgatcagcttcctaccgacattattaaaaacgggtggacctgggatgactttttggcggtctgcgaggcgctccgtcaatattatgacagcaacggctggactgccgggaacgggagatatctggtagaccatacttttacgtgggctccggtcatgttctctctcttccggtcgatggacgtacagatctgcgatgagaacgggaagtggacgttcgattctgacgcgatggagaataccgtcgcgatggttcggaatctgattgacaagaaatatattgccccc

SEQ ID NO: 382 - DNA, 201 bp, Unknown
  BMI gene
  misc_feature: SEQ ID N?984264
ttgtattacaatagggatattgacggaaacgaaaaggataaaaacatgaaaaaaacataccgcacggagagtgattccatcggcgaactgcaggtggagcgggacgcctattacggcgtgcagacgctgagggcaaagcggaatttcagcatcacggacagtaagatgaactttacgttcgtaaaaaatatcgttctgatc

SEQ ID NO: 383 - DNA, 570 bp, Clostridium thermocellum
  misc_feature: SEQ ID N?984807
ttaggcaaccagtttctggcgaatatccgcgagacggacgccgtcgtgcacgtcgtccgctgttttgaggacgagaacatcacgcacgtggagggcggggtggatcccgtccgcgatatcgaaaccatcaacctggagctcgtcttcgccgatctcgacaccgtttccaaacggctggacaaggcgaaaaacatgttcaagacgggagacaaaaagtatcagatcgaggcggagcttctggagcggatcgcggattgcctgaaagagggcaagccggtgcgcacgctctccttcggcgaagaggaaaagacgtatgtcgacagcctgttcctgctcaccgcaaagcccgtcatctatgccgccaacatcgcggaggcggatatgggaaaggaggaaagcgcccttttttacgcgaaaaaagtggtggattacgccgccgcggagggggcggagtccctcgtgatctgcgccaagacggaagaggagctctccatgctcgagccggaggagcgggcgatgtttctggaggagctggggctgaaagagagcgggttgaaccgcctggtcaag

SEQ ID NO: 384 - DNA, 219 bp, Unknown
  BMI gene
  misc_feature: SEQ ID N?984813
aagtatgagcacgacgttgcagcattctttaaacggaaggaagcagatatcggagatatgtgtcctatctggaaggaacatgggtactgtccagcaggattgaattgtcgttgggccttgtcacatacaaacagtcacaactatcgattgatagtgaaacctgaaaccgaacagcatcccattgttgaagtgacaacaaaggttaactttcatttgtag

SEQ ID NO: 385 - DNA, 594 bp, Unknown
  BMI gene
  misc_feature: SEQ ID N?985573
tacataaagaagtttcatggtaaagatatgttcttttcaagctatggcactttcatgcacaagcttattgagttgtaccacaaaggtgaaaagacaccaagacagcttgttgatatgtacttgcaagacttcaaaactgaagttgtgggacgtgctccaaacaggaaggtgttcagtagttactttactggcggcttgcaatatcttaaaacacttcagccattcccgtatgacgtggttggtgttgaaaagaaagttgacttcgtggtaaacggcattccgtttgttggatacatagacttccttgggagaaaagatgatgacctatatgtcgtagataataagtcaaggattttgaaaccacggagcagcagagcgaaaccaacaaaggctgatgaagagttagatgcttatttaaggcagctttatatttactctgcagcagttgaagaagagtatggcaaaacaccgaagagtctttgcttcaattgttttagagataagctgtttatcatagagccatttaaggagcaggcatacgctgaatctaaagaatggcttgcaaagagcattggaaagattcgtgaggaatca

SEQ ID NO: 386 - DNA, 579 bp, Unknown
  BMI gene
  misc_feature: SEQ ID N?985686
tacgcgacgtttatcgaaaccatcacgcccatcgacattcagaacaacaaactgattctgatgaccccgagcgaacactttgccaacgcggtcaacggcaggctgggcgacaaggtgcgcgacgcgctcgcccgcacgaacagcggcatcaccgatttttccctcttcatcggggacaaaaaggaaaaatacttcgaggagaaaaacgagcggctctcctccgacctcccctcttcgcccatcgaccccaagctgacgttcgacagcttcgtggtgggcgactccaaccgctttatctgcgcggcggcgaaggccgttgcggaagcgcccggcgaggcgtataaccccctctttatctacggcggcacggggctgggaaaaacgcacatcttaatggcgatcgcgaactacatcaagatccacaacccgtccgtcaacgtggtatacgcgacctgcgagcagttcaccaatcagctgatcgagtccatctcccgcggaaagaacgacggcgcggcgttccgcagcaaataccggaacgtggacgttttattgctggacgacgtgcagttcctcgccaaa

SEQ ID NO: 387 - DNA, 519 bp, Unknown
  BMI gene
  misc_feature: SEQ ID N?986573
ctgattgaccgcgacccgcaggaaaccgtcgcggagtctgccgttccctggtactccaacgattgctatctttcgctgggcgtcgggctggattcgggaggaaagccgagatgccagtttttgagctacaacgctttttccaataattgcagcacgtacgactacgtgggaaaatcctcagatatcaacattgcggacggccagaaacactggattgaaatcgactgccgcaattttgaaacggagaccgattccggcaaaaagctcaccgcatacatcgacggcgtggaggcggcaagctatacctattacgacgatatctactatgacgcgatgacgcggcaggaatacgaggtcaacatcagcaaaatcaccggctgcatcggcatctatgcgacctccgactggcctgcgggcatttccgccagcagaatggacaattatatcgacatcgaaaaactgcaggtcatcgcttatgacaacagcgaagagggagaatacttcccgcagctgaccgag

SEQ ID NO: 388 - DNA, 420 bp, Unknown
  BMI gene
  misc_feature: SEQ ID N?986887
ggtgatcaggaagagaatgaatcctgtgggagtggagaaatggtaaaggagatggaacaacctgtgaagggatctgaaaaacaacaatcaattgtggatccttcaattccaacaaaagtacacaagaagaagaaaaaacatggaaaaaagaagaaagaaaatataattattacggatgatgacttggggcctttgaccgacttcacaaagaaagaaggatttgtgtatgatccaaccaaagcagagtttgatataaatgaggttcgttttgagaaacgaccatgggagattccggatgtgagaagtgtcttatatctacggcggctagaacgaaaacataataagctcgttcatggtctagcttcggtgcgaaaattgacacccaaacaaatcttaaaagaagagagtaggagttattga

SEQ ID NO: 389 - DNA, 531 bp, Unknown
  BMI gene
  misc_feature: SEQ ID N?987369
atggaagaaggaaagaccatcatcaacgcgatcgaatttgtcagggaagcggggataccggaggcgcaggaagaggccgttccgaatatattggaagaggtcgtttcattcaaagagctgatgttccgctacagctccgcgatgagcacgctgaagacgcgtctcgagatcctcaacgaggaattcagcgtgctgaaagagcgcacgcccattcagagcatcaagtcccgcctgaaaaagcccaggagcatcgccgaaaagctgatgcgcaaggggctgcccctgacgtgcgaatccatccgcggcaacctgaacgacgtcgcgggcgtgcgcgtgatctgcgcgtttatcgaggatatttacgaggtcgcgagcatgctcggcatgcaggacgacatcgaggtgctggacgtgcgcgattacatcgcttcgcccaaagaaaacgggtaccggagccttcacctcatcgtttccgtgcccgtctactactccgaccagaagcatttgcagcgggtggaggtgcagatccgc

SEQ ID NO: 390 - DNA, 537 bp, Unknown
  BMI gene
  misc_feature: SEQ ID N?987573
atgaagatcggggaaaaaatcaaggcgctgaggctccaatgcgaactgacgcaggaagagctggcagaccggtgcgagctgacgaaagggtatatttcgcagctggaaaacgagttgaccagcccttccatcagcacgctgatggatattctctccgcgctgggaacctccctccccgaatttttccgggacgacgaggcggaggaaaaggtggtcttcacgcaggaagagttcatcgaaaaaaagaacgaggactacacgctgaactggctggtcccgaacgcgcagaaaaacagcatggagccccagcacatccgcttaaatcccggctgtcagacggaagaggatttcccgcacgagggagaggaattcggctatcttttggacggggagatcgtgatcgtcctcggaaaaaagcgatataaatgcaaaaaggggcagagcttttactaccggacggataagatccattatatcgtcaatcagaaagcaaagcccgcggtctttatctgggtatccagcccccctaacttttaa

SEQ ID NO: 391 - DNA, 1176 bp, Unknown
  BMI gene
  misc_feature: SEQ ID N?987749
atgaaacagtttaccgttaagaaaatgattgccgcaattctgctctgcgcagcgatttgcatggtacttggcttcacaccgcctgcggcgcatgcagcggcgtatgatgcgtcgaaatggaaagacgtcacggataccccgatcgcggcggatacgcagggaatcatccttgacagcagaacagatccggcgacgtcgggagcttattacacggggaatctcgccaataaatcctcatatatgttgaagaaagagatgacggtcacggtcagattctcctttacaaatcccgtcagttcaaagcatctgattccggttatcacaaacaaaccgattacagcgcaccgcactgatctgaacggttctttgatcggaacgggtgcgccgttgctgggggcccggctttattttcagaacgaagggcagatagcaagcaacaggatattagtccgtatcagcgattatgccaactaccgtacggccgattactttgacaatgtagcatttacagataatctggatgtacataccatctcatggagaattaaggaaagtgccgttacaatgtcctttgagggaaaagcgctcggagcttcgtatgagttgaaaaaggaaaaaacggacggaaaagaagtcaactggaaactgagcgattttatcgacgaggcgggcaatccgcaggtgtatttcggttttatcaaccagaattttgccgatgtccgcattcacggaattgatatcggcgaagaactgccttatcgtcagagcgtgacgattgagccgtcagatctctctgcagagcacagggaagatttgctctatacattccgcgcaaccatgtcggataacggcacggaacaaacgtgcgcgatcgggtacggcgcagacgaacagcaccgtatcaccgcagaattccgctggcaggaggggtggaaagacgcccgcgtagcggaaaatacgtttgaagggcgttatcggttttcggtaaaacgcggcggagaaagcgagggagaaagcgctgttgcggtcggaagtctgccgtttgccgcttttggttcggaaacaggtctggtatttcacatccgcgcggcagtgacggagacgggcgctgtgctgcgcgctttttacggtgcagactgtgtctgcaatcccgaaaaagccgtctttacccttgaa

SEQ ID NO: 392 - DNA, 249 bp, Unknown
  BMI gene
  misc_feature: SEQ ID N?987869
atggcaaatgaaaataaacccgatacaaatcatagtcaattcttcattactctagatgcagcagactggttaacaggaaagcatactatattcggaaaggttgttggtaataccttgttcaatgtactgaaaatgggtgaattggagacagacaaggaggatcatcctttgtatcctccagtgatcaaatctatttctgtaattgtaaatccttttgatgatatcattccacggtatgtgtttatatga

SEQ ID NO: 393 - DNA, 591 bp, Unknown
  BMI gene
  misc_feature: SEQ ID N?988131
gcatcgctgaagatcaccgtcaagggaacgccgttagacgatatttcgatcacgggcattacgctcagcgagaccgtgctcaacctgctggtgggcgaaacgcgggagatcaccgctacggtcacgccttacaataccaccgtcaaggattacgagctggtgtggagctccggcgacgccgcgaaactcaagatcgagcagacggacgacccgaatacggtgaaactcaccgcgctcgagagcacttacgacagaaagacgacgacgaaccgttcgtttacgctggtcgtctccatcagaggtacctcgatttccagttcctgtacggtttccatcgaggatgaattcgaggtggaagggcgctacctcaagtcctacaacgggcggggggatgaaaacggcgtcgtcaccgtgccggacgatctcggcatcgtcaatatctaccgctacgcgttcatgaacaacccctatatcaaagaaattatccttcccgaaggggtggaggagatcgaagaagccgcgatctacggctgcgaaaatctcgaaaaggtcgtactcccggaaagctgtacgaaactcgataagtgggcg

SEQ ID NO: 394 - DNA, 363 bp, Unknown
  BMI gene
  misc_feature: SEQ ID N?988239
tattatcctttcgggaccactaatctggatgctttgtcaacgaaatttgctattcctaacaagttcacattacctatcgatctgtcattgtccaagtcagatgagcttcctgtcgtctgttcacatccagagtctcctatatctgacaaattctcaatgattgcagaatcggtactatttttgttatttcgtaatttgaagctaattgcagatatggtgcgtcgtcgttacattccaggcacaaactatgaggtttcatttaagaaggaagatggcatagttcttcggaagatctctcccacctctgctgaagagatcaaaatgaaacctcgagattatatcctttgtctgaataagatttga

SEQ ID NO: 395 - DNA, 1032 bp, Bacteroides capillosus
  misc_feature: SEQ ID N?988624
atggcagaaaatcagacacccatgaccgaaacgaacaatacaaacgagcttgcggtgcgccgtgagaagctcgccgcgctcactgcggcgggcaaaaacccgtttgagctgacctcctttgatgtcaatgcgcacagcgaggcgatcaaggcggacttcgatgcctatgagggcaaggacgtgcagatcgccggcagaatcgtcggcaagcgcgtcatgggcaaggcgagcttcatgcacctgctggatcgcgacggcaagatccaggtctatgtcaagcgcgacgacatcggcacggacgaatacgccgacttcaagaagtacgacatcggcgacatcgtcggtgtcaccggctttgtgttccgcacgcagaccggcgaggtttcggtgcacgccaaggcaatcgttctgctgtccaagtcactcctgcccctgcccgagaagtttcacgggctgaaggatcaggatctgcgctacagacagcgctatgtcgacctcattgtcaatcccgaggtcaagcgcaattttgtcatccgttcgcagtttatcaaattcctgcggaattacctcgataatatgaactatatcgaggttgagacacccgtgctcaacaccatcgcgggcagcgctgcggcgcgcccgtttgtcacgcaccacaacacgctcgacattgacatgtacatgcgcatcgccaccgagctgccgctcaagcggctgatcgtcggcggcatggatcgcgtctacgaagtgggcagaatcttccgcaacgagggcatggacccgaagcacaatcccgagttcaccacggtggagctgtaccaggcgtatgctgatttccacgatatgatggacattgccgagggcgttctttccggcgccgccaaggcgattcacggcacctatacgcttgcgtggctgggcgagaccatcgatctcacgcccggctggcgcagactgaccatggtggatgcggtcaaggaatacgtcggcattgacttcggcgcgatcaccgacgacgccgaggcgggtggc

SEQ ID NO: 396 - DNA, 186 bp, Unknown
  BMI gene
  misc_feature: SEQ ID N?988901
atgcaatttgcctttgtgacccctcccgtgaaaaaagggataccggagtgtccgcagacgctccgggatcccgaaattaaaaataattcttcccctgaatatgcgcaaagcccacgcggcgcgctttccaaaccgtccccttacgccgccgcgggcttgcggaagatggccattgcacgcttgtag

SEQ ID NO: 397 - DNA, 345 bp, Bacteroides capillosus
  misc_feature: SEQ ID N?988992
atggaaaacaagctgaaccttccgctgaaaaagaagaaaaacgaggccgagagcccgcgcctcgatccgctgatgcgcgcgctcaaggcgctgcacagcgccggtgcgccagaaagcatgaccgccgaagagcttgagcgtcagcgccgcagtcaggaggtcctcggccggttgaccgcgccgatggccggcatggactatgaggaattttcactcggcggcatgaacgccgcgtggatgcggctcaaggctcctcacggcagccgtcacgcaattctctactgccacggcggcggctataccagcggcaacctgggttattcccgggtgctgtcctccaagctg

SEQ ID NO: 398 - DNA, 528 bp, Unknown
  BMI gene
  misc_feature: SEQ ID N?990803
gagggaatgtttgaaaatacgtcccgcaaagtgggcgtcgtcgcctgctgtgcgaatcgggacaatgcggttttgttctattcttatatgacgggaacgccggaacccgacgagccggcatcgaccgtgctgcgcgtggggtattatttccagagctccaacccgattaccgaagcggagcttgccgccgtcaaggctgcatttgaggcggcgaacgagggaatcacgatcgaatgggcggaatataaatacagcaagtcgagcttcacaatcaacgacatgatcaaggatatcaacgctaaaaacagcgatgcggatgaaacgaacaacatcgactgtctcgtcaatttcgggaaaaatgccacgacggcgaccgaaacgggatcggagcagaccttgcgttacgtcaacaacgtgcaggtgggaacgcgctatgtgcttcagctgaacgacagcgccgctgccgctgcgttctatgcttttgcgcagaataacgagacgctgaaaaacctcggcgccgcgtcataa

SEQ ID NO: 399 - DNA, 357 bp, Unknown
  BMI gene
  misc_feature: SEQ ID N?991371
atgatgaaacgattttttttgttgctgctggcttttctgtgtttcctgattcccgtcggctgcggcgatcctgacagcggccaaaagccatccgaaccgaccgtgccgtctgaaccggaggttcccgaaaagcccgcctatcagaacgcttacctgaataaaaaggacggtctgaaaatcctcgcgatcggaaacagcttcacttacgtgagcacgcaatatctctgggaagtgctcgacgacctcggctttacgaacgtaaaagtggcgcggctctacatcggcggcacgtcgatcagccagcacgcggcgaatttttccaccaacgcttcctattccttcgactataagaccgga

SEQ ID NO: 400 - DNA, 414 bp, Unknown
  BMI gene
  misc_feature: SEQ ID N?992093
ttggatacggagaaaggcatgacggtctatatcgaatacgcggttctggataatttcatcatcgactggctgctctttcgctacaccttgctttttttggggctgaaggtgagaaaaggtcggctttttttctgcgcgctggcaggggcggcgttcgctgtcgcgctcccgctcgtcgttctgcccggctgggcggagctggcgctgaaaggaatctcgggggcgctgctcgtgctgtggctggcgaaatatccgtccgcccgaaaatactgcgcggcgctcggcgtgtttttcctgctcaccgtcctgacgggcggcgcgctgaccgccttcttcaatctctttcaggtgaattactccgccgaatactgcgtggggctgatcatccagggcgcgtggctgatctctttcggc

SEQ ID NO: 401 - DNA, 639 bp, Unknown
  BMI gene
  misc_feature: SEQ ID N?993022
atgttacctacaacagcatctattgttcctttaaatgatgtaactcattctgtttcggcactcgcagggacagatgctttgggccgggaaattcgccctgcaactgagaaaaaagacaaacttgtaggtctcttttattttttatggctggggaattattattatgaaggacaacagatgtttgatgagatctacgatatttccaagacagatctggcaaagatttttgcatcgaacgggggtacgcctttttcccgcatgcatttttggggagaacctttgtttgggtattataacatgcgcgaccgttgggtggtcgaacgccatatccgcatgtttatcgctgcaggtattgattttctggcattcgatacaaccaataatgattattaccccaaagtgctggacgttgtgctggaggttcttcttgactatcagagtcaaggctatgacgtacccaaaatcatgttcctgactaatacggacagcggtgtacgggtgcaggaaatatatgattatgtttacgccaaagatgattatcgttctctttggttcacggatgaagacgaggggagaaatccggaaagaaaaccgtggatcacgatcaataagagtcaccttgtttatctgtcgaaagac

SEQ ID NO: 402 - DNA, 555 bp, Unknown
  BMI gene
  misc_feature: SEQ ID N?993023
tttaaggacagtcaatggccgaataatccctatcttgaagatggttttccctggattgaatttacccgtccgcagcctgtgcacaatgggatcgtcagcgtctctgtcgcgcaaaatgcagggatgcacatgagcagctctgttcaatataaagtcagtcccaattcttatgattactataacagtaattggggaagaggatatacgacatacggaaagaacgattctgcaaaaattgcagaaggagctaattttcaggaacaatgggacaatgcgatagcgctcgacccgcatattatatttgttaccggctggaatgagtgggcggcactgaaactccacaccaaagttaccggaataggtgacagcaccgtttttttcgactgctttgatattgagttttcgcgggatattgaaccgatgagagacggatatggcgataatttttatatgcagcttattatgaacgtccgccgctttaagggcgttgagaatagcggaatttcttttgaccgcaagacggtggctcaatggagtgactggaatgaagtaact

SEQ ID NO: 403 - DNA, 507 bp, Unknown
  BMI gene
  misc_feature: SEQ ID N?993676
cccgccatcaccgacagagaggagatcttcgtcaagcactttctcgacagcgcgttggggatttcctgtgtacaaccgggaaatttgatcgacatcggttcgggcggaggactccctgcggtgccgatcgccgtctttcgggaagacgttttcgtcacgatgctggaggcaacggggaagaagtgcgattttctcactgccgtgatcgaaacgctgaatctgaagaacgcgcgcgttttaaacggcagggcggaggaatattccagaatgcaaacttaccgggaacggttcgactgctgtactgcccgcgccgtcgcccgcatgaatacgctctgcgaatatgccctgccctttgtccgcgtgggcgggagctttgtcgcctataaaggggacgccgccgaagagacggcggaagcggcccgcgcgatcgccttgctcggcgggaggctgaaagaggagaaacggatggaattggagggggcgtgccgcacgattgtggtcgtagag

SEQ ID NO: 404 - DNA, 447 bp, Unknown
  BMI gene
  misc_feature: SEQ ID N?994346
atgtttaagggattagcctacatgcatagtctaggcatttgtcatcgtgatatcaaaccacagaatgtcctgatcaaccccaggactcatgttgtgaaaatctgtgattttggaagtgcaaaacgccttactcctgatgagtccaatgtctcgtatatttgttcccgatattatcgcgctccagagctaatcttcggtgcaaccaactatacggtagctgtagacatttggagtatggcatgtgttattgctgaattgttaaccggactctcgctattccctggggagaataatgtggatcagatggtcgagattatcaaagtgttgggaacacccacagcagaggagattcatgaaatgaatcccaattatcacaacttcaagtttcccaatattcagaagaaagacttcccagaagtcgatttgaatgagaggaatgagaagtag

SEQ ID NO: 405 - DNA, 366 bp, Clostridium thermocellum
  misc_feature: SEQ ID N?994514
tttacggtaaaggcgggaaagaacaatctctccaacgattttgtcacgtctaacgcccggagcggggatctgtggctgcacacgaagggatatcattccgctcacgtcgtgatcgagcggggaagcggagatttcccggaagaggtcattctgcgggcggcgcagatctgcgcctactattcggaggggcggaacggcagtaagattgaggtggattacacgctgaaaaaacacgtcaaaaaaccgccgagagcgaagagcggtttcgtcttttacacggattttaaaacaattatcgccgacccggataaaaacgaggcgtatctcgcgggaaattcgggggaagttcgcggaaaaaggtcataa

SEQ ID NO: 406 - DNA, 513 bp, Unknown
  BMI gene
  misc_feature: SEQ ID N?994675
gcggtttacgacgtgcatccgtatgtacttttgaattatcagaagaccacgcacgatgtgtttaccatcgcgcacgaactcgggcacagcctgcattcttatttttccaatcacgcgcagcattacgcaaaagcggattacaagatattcgtcgcggaagtcgcgagtacggtcaacgaagtgctgctgctgaagcatattctcggaaaagcggaggataaaaagctgaaaaagtatctgctctcctatttcctcgagatgatccgcacgacgctgttccgccagacgcagtttgcggaatttgagtttatcgcgcatacaatggcggaaaacggcgagccgcttacgaaggagaaactctcctccgaatatctggaactcaataaaaaatattacgggaaaagcgtggtatccaatgaggagatttcatacgaatgggcgcgcatcccgcatttctacaatgcgttttacgtctataaatatgccacgggtattatttcggcaatggcgatc

SEQ ID NO: 407 - DNA, 543 bp, Unknown
  BMI gene
  misc_feature: SEQ ID N?994879
gagactgctgaataccaagaaacgatcagtttcaatggttatctctcgtttatggctaagatgtcctcatcaagtgattgtgttattgtccctaatgatcttacagcctcgtccacgacctgtgtgaatgtaaattatgtgttctcatggactcgtgtgacatatggttatatggttgctgctagtttgccaggtgttattaatgtcgaatttagtggtccttctatccctgctgtgaatggaattcgtatctggccctacgcaagtccagcttcatctcctactgcctttactttggctggtggagaatctgtatcaacagcagtatggacaacgatcgtcaatccatcagaacaggagtacacttcgctcacatggaaggaatggtcgaatcctctcgcttctaccaagtatcctgccttgagactgactatcactgctggcagtacaacatatactaacctttttgaggtacagttcttggtatgtaatgctgcagctgcaacatcgattccttatcctacaactgatttccagtattat

SEQ ID NO: 408 - DNA, 423 bp, Carboxydothermus hydrogenoformans
  misc_feature: SEQ ID N?995248
atcatctgcatgacggatgcggacgtcgacggcagccacatccgcattctgctgctcaccttctttttccgcttcatgcgcccgctcatcgagaaagggcacgtctatatcgcacagcctcctctctataaggccacgaagggaaagacggagaaatacctctattcggacgaacagctgaaggcctacctggaagaggcgggcaaatgcgacattcagcgctacaaggggctcggcgagatgaaccccgaacagctgtgggagaccacgatgaacccggaaacgaggacgcttctgcgcgtcaatatggaagacgcggtggaagcgaacgagatgttcaccgtcttaatgggcgaaaagccggagctcaggcgcgcgttcatcgagcagaacgcgaaactggtcgcggatctggacgtgtaa

SEQ ID NO: 409 - DNA, 648 bp, Unknown
  BMI gene
  misc_feature: SEQ ID N?995319
gtggtggtgaaaaacgacgtcaacctcgcgatggagggagaaaaggcgtacggctccgcgctgcgcgacgtgaaaaacgccctgatgctgcacgtagacgtcggcacgggcgccgcgctcatgctccacggacagatttacgagggcagccacggctttgcgggggaaatcggctatttcaggctgaacatgttttcctgcgcggcggacagctttgacaatctgagctactttaacttttacgacagcgtgtctctgtactcttcgctctccatattaaagcgggaagtgcagaacggcgcggagggatatctgaaggcgtacgccgaggaaaagggaatctccccctccgagctcaccattaaagcgatgacggaggcataccgcgccggcgacccgctcgtgcgcaaagtcctgaacgcctccgggcgggtgatcggaacggtcgccgccaatatcgcggaatttctggacgtagacaccgtggttctgaacggcgcggtctttgaactgggcgacccctttttggaggtggtttccgcgtacgtcgagggaaagacggtctgttatcccgaattgatggaaaaagccacgctgatgggggcggtcaacgccgggctgacgaaggcgtttctcaacaatttttag

SEQ ID NO: 410 - DNA, 1887 bp, Ruminococcus torques
  misc_feature: SEQ ID N?995630
atggataatcagaaattcggaagatttataagagacttaagaaaaaaggcaaatatgactcaaaaggaattaggagagaaattaaatgtaacagataaagctgtttcaaaatgggaaagaggcttaggcttccctgatattacaattattaatttattagcagaaacttttgggattacagcatcagaagtattaaatgcagaaataggaaaaaaggagactgttgatgtagaaaaagcagtacaagaagctgtagagaaagtaacgaaagaaaaagaaaggaaagaaaacagaaaaagaaaattaattaaatttgtaaaaataatatctattataatatttgtattaatgcttttattacaattagggtatctatgtataatgaagccaaatggatatgaatatataaatgatttaatattttatattattaatgaatttataattattactggagtagtgtttcttattttacagataaaaaagttaaagagtgtaaagatagtagctataattattgcagttattttgagtattattaatctagcttttatgattaataatgcaattaatataagaactatatttagtttttctaatgacttttcaaatgaattagtaataaaacagaataaagaaaatggaaaaactaggctgtataaatatgccaaattaattttatttgcaaaaccatatgaacgatttgaatattcagtaagtgaaaatataaaacatcagtggcttacaaatgacatttgcaatataacttatacggataaagatgataatttaagaaattatgtagcgacatatggaagtagaaaaggaacagattcatattattctgtatttaatgcattattaggaagatggcaaatacaagtagattcaataggagatacaaaattaactgtagataaaaaagggataaaagtaacacgaaatgatacagctgaacaatttgaagttagtgattgcaaacaatatggtgttacagcattagttctttacaaagaggatattcctaaatatgtaattgcattaaacgatgattgcgaaattgatgatgatactaaatatataaagaatggtggaacaattacattttgtgatatttcgatgaaaaagacaataaaagaaacattatattgtacagtatataaggatgagaatttaaataattataatggtataacagtagaagcaaataattttaaaatagataatggaattttatattttagttatgatggcgaaaacataatagaagttccaggagattttacagatgataaatcagcgtataatgagtataattatataatttctgaagaaaaaacggtatttttctatactaaagatgagacaaaatatttagtgtattcagatgatatgggaaatacatggaatacagctaaattaccaagtaatggaacgattcagaatatacaatttttaaataaagatgtagggtttatattacaatttgaagactatgccttaggaggagttacttttgggcatattgttaaaactacagatggtgggcaaacatggacgattataaataatggaattggaagttctaatgaaggtacatttagaagtggaagtcaattgttatttgtaaatgaaaatattgcttttattacaatgccatatgccagcggagatgactctgacatatattattctgaagacggaggtataaattttacaaaagttactctaagtgatgagcagatttatgattattattatttgccaactataaaagatggaaaactttatttagaagttggccaaggaaatgatggagattataatggtggagattctaaaaaatattgttcagaagataatggaaagacatggactgaaatgtaa

SEQ ID NO: 411 - DNA, 288 bp, Unknown
  BMI gene
  misc_feature: SEQ ID N?997271
atgtttggatcgttctgtgtgtgtgctgtggatgctatgacaatgttaccaatgtacagcaagagtatcatgggagctatgacagactctacatatcgtgaactgagtgtaatcgtctgtaaaggactgactctccttattcgcagcaatcagttggctttggaggatcaacaagagagcccagaaattgagagtgagaatgacagtgagagtgaaacggatcctgagattcaagaagggaggattcgagatgaagatctgggagaagaaatcgtgggtattttgtga

SEQ ID NO: 412 - DNA, 465 bp, Clostridium bolteae
  misc_feature: SEQ ID N?998136
cacaacctgaaagcaggaaaaacattatacagcgaggttatcaaaatggaacacagggtaaaagtaaccgttatagacaaaaaattatatcccgaattgcaggccctctattgcgccgttcccgacagcgggaaatgtccgtgtttcaacgttggggatgaatttctctttttcagaaacgacgagcgcgacgattattggcacatgggagagggcacgttagtcaaggaaggcgttcccgacgaggggtgtctgcagtcgcccggaacaaagcattgcgggacaaaaggcgtccccttttgcagcgaggcgtgggattgcatcagccggtatatttacgcggccctgcaaggcggcgcaatcatgcacggttggacgaatgacgacaaagttatgattgcgtgctgcaacgacggaacacggcctgtcatttttaagatcgaaaggatcgatacagaaaattaa

SEQ ID NO: 413 - DNA, 318 bp, Ruminococcus gnavus
  misc_feature: SEQ ID N?999609
atggaaaaattagttttaatcgacggaaacagtttaatcaaccgcgcgttttacgcgacgccgccgctgacgaaaaaggacggcgtgcccgtcaacggcatttacgggtttacgatcatgctgctccgtctgctgacggaggaaaagccggactatctcgccgtcgccttcgacctgcatgcgccgactttccgccacgaaatgtacgcggattacaaggggacgcgcaagcccatgccggaggatctgcgcccgcagataccccttttaaaggaactgctcgccgccatggaaatttgcatcgtggaaaaagagggc

SEQ ID NO: 414 - DNA, 579 bp, Unknown
  BMI gene
  misc_feature: SEQ ID N?1000035
ctcacctgctactatgtgaagtccaccgcggagcacttcggagaagccgcagaaattctggcggacctctttttctgctcgcagtatgcggaagaagaggcggaaaaggaaaagggcgtagtgctggaagagatcaacatggaggaggattcccccgaagatctctgcctcgatctcctttccgaagcgtatttcgggaaacggggatacggcaggacgattctgggaaaaaaggaaaacgtaaagcgtttcacgcgggaggacctgttcgattacgtcgcccgctattacacgccggacaacgtcgtcttatccgtggcgggaaacgtctcttttgaagaggcggaggcgatcgcggagcaatattttctccccgcctttcagggaagaaaaaaccgcccgcacagtatgaaagagccctcttttgccggggggcatctcttccggagcaagaaaatcgagcaggcgcacgtggcgctctgcgtgcagggcgtagcgctcggcagcccggagatcaacgcggtgaatctcgcgaacgtagtgttcggaggcggcatgtcctcccgcctgttccagcgg

SEQ ID NO: 415 - DNA, 378 bp, Unknown
  BMI gene
  misc_feature: SEQ ID N?1000135
cagttgatgcattctcgctctcgtgtgcatgttcgcaaggaagccaaggcccgtggcaaccacactggttatggtaagcgtcgtggtactatgaatgctcgtatccccgagaagctcctttgggtgcgtcgtattcgtgtgctgcgtagacttcttcgcaagtatcgtgaggctggaaagatcgataagcacatgtatgcccacttctatgctcttgctaagggtaaccgttacaagaccaagcgtgtgttgattgagcagattcacaagaagaagagtgaggataagaaggagaagcagttggctgagcaggctaacgctcttctcaaccagaagagagctgctgttgctgctgatggtgcggtcgcctctcaataa

SEQ ID NO: 416 - DNA, 267 bp, Unknown
  BMI gene
  misc_feature: SEQ ID N?1000173
atgaaaataacagatgtgcgcgtccgcctggtcaaaaacgaagacagcaagctgaaaggcgtcgcttccgtgacgttcgacgagtgtttcgtcgttcacgacatcaagatcatcgacggccccgacggttttttcatcgcgatgcccagcagaaaaggcaaagacgggacattcaaagacatcgcacaccccatcaacacggaaacgagagaggttttggttcagtcggttctgaatgcctattctgccgaaaccgcttcggaataa

SEQ ID NO: 417 - DNA, 453 bp, Unknown
  BMI gene
  misc_feature: SEQ ID N?1000414
gtcgggttccgcagccgcgatctggtcattctggaaagagaattcgccgaggcgtccgaccggctggtcttgatgacggacgacggcagttacggaaagaagggactggtcacggatgccctgaaagaactcatcgaggggggagaagcatacgatgaagtgattgcgatcggaccgctcgtcatgatgaaattcgtctgtaaactgaccaaggaatacggcatcagaaccatggtgagcatgaacccgatcatgatcgacggaacgggaatgtgcgggtgctgccgcctgaccgtcgggggagaagtgaaattcgcctgtgtggacgggccggatttcgacggccatctggtggatttcgacgagaccatgcagcgcgcgggaatgtaccgcgaattcgagcaaaaagagcgggaacgcgtctgcaatctcttcaaaaaggaggtggagtga

SEQ ID NO: 418 - DNA, 399 bp, Unknown
  BMI gene
  misc_feature: SEQ ID N?1000839
atgaagacgcagttcagaacggaaaaatccgccgaatttataaaacagtaccggcggaacaatctgaaaaagaatctggtgagctactcctttctgctccccgtgatcatcgggatcctcgtattcacgctgtatcccatcgtcatgtccgcaatctacgctttttcggattttaacggcgcgtttatcacgaaattcgggttcttcaatttcagatccatcttttcgtttgagatcggggactggggagaagcctttttccattccatgaaggtcacctttctctatgtgctgggaagccttgcgatctcgctcacgctctcctatattctggcgctctttttgaagagcgagatccccgggatccgcgtgatccgcgtgttgtgttatcttccctgt

SEQ ID NO: 419 - DNA, 654 bp, Unknown
  BMI gene
  misc_feature: SEQ ID N?1000930
ccgcccctcgcgcccggcgattaccgggtggtgtgtctgggcaacacgcaccacacgaagaccgtgaatctttcggccggaagtttcgatgcgatccgcttcgccgacgcggattatgtggacacgggcgctgcgtcgggcaacgactcactctactatgcgtcggtgcctgtcacggtgaccggattcaccggaaaagagggggatcggaccaccctcgtacccttcgtctgctcccactacgatctgtcggtcgaagtggccggcattccccggtccgatgtcagagccggcctgctgccgaagctcgaaatctgcggtgtcgcgccttacaccgactttgagaaccgcgtatgcggagaggcggccgactatacgctcgaaaccagatacgacgccgacaagatgctgttgacctccgagaccaatatcatgcggcatacgaatcacgaggcggtgagcgtctgcctgcgcaccgcttcgggcgaaagcactttcgtcgaggtcaatctcgcggagttcctggccgagcatccggccatagattgttcgaaacaggaggtgctgatcccgatccgcatcgaattcacctcggcgggtgtcgaggtttcggtgccggactggttcgttcaggaggtgaaacccgaattttaa

SEQ ID NO: 420 - DNA, 801 bp, Unknown
  BMI gene
  misc_feature: SEQ ID N?1003010
atggacagaatacagaaaggtatgggcaggacaatggataaagagatgaattcagcatataagctggtatgggaagatgattttaatggaaataaacttaaccgtcaggactggaatgtagagctgcatgatccgggctgggtaaatcaggaatggcaggaatatgttgattcagaggagaacatatatgtaaaagacggcaatcttatcattcagccaatcaggactacgaaggatggcaaggaatattacacttctggaagagtcaatacgcagaataaacatgattttgaatatggaagattcgaggcaagagccaaggttccaagtggaaagggctttctgccggcattttggatgatgccaacagatgaggacctctatggacagtggcctaaatgcggtgaaatcgacattatggaagtgcttggtgacaataccggaacaactcatggaacattgcattttggtgaaccacatacgcagagccagggaacatacagactgacaaaaggcgattttgccagagaatatcatgtctatgcatgtgaatgggaaccgggtgagattcggttttatgtggatgatgtgctctattttacggagaaggactggttcacgaaaaaagatggagctgataaggctgcataccctgcgccatttgaccagccattctatatgatactcaatgttgccgttggtggaagctgggtaggatatcctgatgaaacgacacagtttggtgagaatgcaagactggtagtggattatgtcagggtataccagaaagatgagttctaa

SEQ ID NO: 421 - DNA, 1026 bp, Faecalibacterium prausnitzii
  misc_feature: SEQ ID N?1003309
gagaccttccggaacgcctacggatattacattcaggacgacggcgttctgaagctccgcgctgacctgaccgccgaggagcgtacttctctggaagagatcgtcaccatgccggacatcgtgctgtatatggccgcttcgcaggctgccaatggcaccgggatgcccgcgcagggcatggctcccctttcggagtatccggctgcttctagcgaggccgctgagagcgcagccccctcggaaaacactgaggataccgcagcggagaccatcgcccccactgcggccgatctggacgccgtgtgcgcccagtttgcggccatggcgcagatgccgggcttctcccgcgagatgatccagcagcagcttgccagcgcaatggcacagatcgacgagacgaccctttccagcatggccagccaggccaccctgctggtcagtctggaatacgaggcgcagggcgtcgcgcacgacgtccagatgcagtatctcttccgagtgggcgggcagatgctgggcctgacgctgctgatggtggtggtcgccattctggtgggcctcatcgcttcccgcgtgtcggctgccatcggccgtgacctgcgtcggcagaccttctcctccgtcatccatttctccaacgcagagatcgagaatttctccactgcttccctcatcacccgcaccaccaatgacatccagcaggtgcagttcgtctgcgtcatcctgctgcgcatggtggcctatgcgcccatcctgggcatcggcggtgtgctccatgtcgtgcagggcaacaccggccttgcctggatcattgtgctggacgtggtcctgctgctctgcctcatcgtgttcctgatgaacatcgcgatgccaaaattcaagatcatgcagacccttgtggacaagctgaacctcgtcagccgcgagattttgaccggcgtgatgccggtgcgcgcgttcagccgtgagaccttcgaggaagagcgctttgacaaggccagcaaggagctgatgggcacccagctg

SEQ ID NO: 422 - DNA, 603 bp, Faecalibacterium prausnitzii
  misc_feature: SEQ ID N?1003735
gattccctttccgtcaaaggtgtgagcctattaggaggcttgatgaacatgcaatacgaactgaccaccccctgcaccgcgcaggacctggccccgctccaggcgggcgacaccgttctgctgtccggtgtggtctacacggcccgcgaccaggcgcacaaacggatgctggaagcactggaccggggcgaaccactccccttcgacctcgaaggcagcgccatctattacgtcggccccacaccggagcgccccggtgcggtcatcggctcggccgggcccaccaccagcggccggatggacgcgacgagcccccgaccgctggacctgggcaacaaggtcatgatcggcaagggcaagcgggatgccgccgtcaaggaagccgtcgtgcgcaatggcgcggtctatctggccgcgctgggcggagccggtgccctgatggccaagagcgtcaaaacgctggaagtcatcgcctggccggacctcggctgcgaagccgtccgccgcctgaccgtggagcagatgcccctgaccgtcattctggatgcccacggcggcgacctctatctctccggcccggaagcctaccgcgcgtccagataa

SEQ ID NO: 423 - DNA, 1500 bp, Unknown
  BMI gene
  misc_feature: SEQ ID N?1006216
atggaacaattatcctttttgaatccttcctcccaagattatctgatcgagcagttttcttctgacgccttatgcagcgaccttgagcgcaaaatgctcgaatctcgttatgctccccttctcgaggtcactgaccgtttcgacaggcgaagcgtcagctatcagctcagcaagaacgagatcctccacagctggctcaaatacaaagaaggtttttcagcggaccttgtccaactgttgctccatgagatgggggctcaccccggcgatctcgtcatggaccctttcatgggctccggcaccacggcgctcgtctgccagatgcagggcatcaacagcattggctacgatgtgatgcccatcgcggacgtctccttaaaagcaaaggctgcctgcatggagtacgatcttcctgaacttcgtgccatgctggaagagctgaagtctctccacatgccagacagctattccttgaaaacaccttgtattcccatcacacaggatgcctacccggaatacaacgaacgctaccttcagttcatcgaagactggcgtatccactgtatctattcagagaatgccaaaaatcttcttcggctctgcattctcaattctctggaaccgtgcagctacaccgtaaagagcggccaatatctcggctgggacagccgttccccaaaggtgatccatgccaatgagcttcgcgcagccaaaggcaaaaagccgttgtccgctaaaacagtccgttcaaatatcctcgacagccgtgataccgttctattggaactatcgcatgtgatccacgaccttgaggtgatccagcattccagccagacgcacgaaaaagcacagatcatctacaaacagaacagcgttctgttcgaactgcccaggcttccagatcacattctgaaaggcgttattacctcgccgccgtattgcaaccgatacgattatacccgcacctatgcactggaacttgtttacctcgggcttgataacgattcgatcaaacagctgcggcaggaattgctttcctgcaccgtcgaaagccgatccaaactggaacagttgaagctcttctatacagagatcggtcaaattgaccgtttccatacgattcatcagacactttgttccaaccctgctttttgtgaggtgctggatgccttacacaagcgcgaacagcatggtgatttgaacaatagcggcatcgtccgaatggtagaaggatactttacagaactggcctttatctatgccgaacttttccgcgtttgcaaaaagggcgccatggtcgcgttcgtcaacgacaatgtccgttatggcggcgaagtcatcccagtcgattttttgagttgttctcttgccgagcagtttggctttaccgtcaaaaaagtctactgtctcaaacaaaagaaaggcaacagcagccagcaaatggccaaattcggccgcgtcgctctccgaaaaagcattacgatctgggtaaaatcataa

SEQ ID NO: 424 - DNA, 435 bp, Faecalibacterium prausnitzii
  misc_feature: SEQ ID N?1007586
atggggttcgacaaactcagctttgatctgggcggggagaccgtggtgcagcggagcatccgcgcctttgcggagtgcccgctggtggatgagatcgtgctggtggcggggaagaaccgcgcctttctggagcagcaggctgcggcctgcccaaagccggtgcaggtagtgcccggcggggccacccgcgccgagagcgcgaagaacggtgtgctggcggcgcacggcgaccttgtggccgtccacgatgcggcccgtccctttgtgagcgaagccgtcatcgaggcggccgtctacgccgcagcggcctgcggggccgcagccccgggggtcccggtgaaggacaccgtcaagcgggctgtgcgcggcgacggcaagaccgtgccggaggcctgcatggtggccgaaacgcccgaccgcagcacactgtatgcg

SEQ ID NO: 425 - DNA, 318 bp, Unknown
  BMI gene
  misc_feature: SEQ ID N?1007857
atgggacttgatgcaatcgtcggtgtcggaatcattcttctcggcggcgcagtaggcttcagtaccggaccattaaatggatcaacaacaaccgtggcgcaggaactggcaggacttccattgtactcaggaatcggctaccggatggtatgccttgtggtatttgcggttgtgacgaatatctaccttgttcggtatgcgatgaagatcaagaaaaatccggaattgagcccaatgtacggatatactgcaggcactcagaaatctgaagaaaagtccctagatgattttggacctatgacaaagacaagaagcctt

SEQ ID NO: 426 - DNA, 288 bp, Unknown
  BMI gene
  misc_feature: SEQ ID N?1016289
aaggatcttgatgaagatggtatcatccgtatcggtgctgaggtaagagctggtgatatccttgttggtaaggttactccaaagggtgagacagagcttacagcagaagaaagacttcttagagctatctttggtgagaaggcaagagaagtaagagatacatcacttaaagttccacacggtgcttatggtatcgttgtaggcgttaaggtgtttacaagagaaaatggagatgaattagctccaggtgttaacaagaatgtccgtatctatatcgcacagaagtga

SEQ ID NO: 427 - DNA, 624 bp, Roseburia inulinivorans
  misc_feature: SEQ ID N?1020717
ggacaaaaagcggactactaccgcagtaaggcagaggccgccgagaagaacaccgccatttccagcgacgaccccgaagccattgacaagctgaaagaaaaattgcagcagcgccaagacctgcaaagccatatgaaaaaggtaaacgcctattaccgcaaaaacggcacaatgaaaggctttgagggcatttccgatgaaaaggcggctgaaattgacgaggccgtaaagagtgactattcgtggatcaccgccccgtatgctccctatcagttatccaacaacaacgcggaaattaaccgtctgaaaaagcgtattgaaagtctggaacgccgtgaggaaacgggttttgtcggctggaaatttgagggcggcgaagcggttgccaatcaagaggaaaaccgcttgcagcttctttttgacgaaaagccaagcgaggaacagcgaagtaaacttaaaagctggggttttcgctggtcgccctcgaacaaggcgtggcagaggcagttaaacggcaacgccatttatgccgccgggcagattgattttataaagccacttgacggcagaaccccgcgcgagctgcaaccgaagccgaaagccaaagacgaacaggaacgataa

SEQ ID NO: 428 - DNA, 312 bp, Unknown
  BMI gene
  misc_feature: SEQ ID N?1022607
atggatacaacattaatcattatggcggcaggtataggttctagattcggagagggaattaaacagttagcaaagatgggaccaaatggggaaatcattatggattattccatttatgatgccaaagaagcaggatttaataaagtagtttttattattcgtaaagatatttttgaagagtttgaggaagttatcggaagcagaataaaaaaacaaattgacgttgaatatgtatttcaggaacttgatgatcttccagaaggatttaaattaccagaaggaagaacaaagccatggggaacaggacaggca

SEQ ID NO: 429 - DNA, 390 bp, Unknown
  BMI gene
  misc_feature: SEQ ID N?1025105
atgaagtatattggtagcttgaaggaaggaatgcgaatttcggaggtgtatctgtgcaagagcagacagatctctctgacgaaggcgggaaaagagtacggaagtctggtgcttcaggacaagacgggaaccgtggatgcaaagatctgggatctgggttccccgggaatcggaaattttgatgcgatggactatgtatctgtggatgcagatgtgacgatgttcatgggttcctgtcagctcaatgtaaagagaattcgcaaggcagacgaggacgagtatattccggcggactatcttccggtttccaagaaggacattggaaagatgtacgcagagcttctgaacttgattgcaagcatgaagaatccttacctgaaaaagctggca

SEQ ID NO: 430 - DNA, 864 bp, Unknown
  BMI gene
  misc_feature: SEQ ID N?1025287
agccgttctctgctcccggcgctgaaacagcagggactttgtgtcgtctgggaacacgaggatctcgacgagaaggatggagagtttgttgaccgtttcttccacgagaatgtctatccggtgctgacaccgatggctgtggattcctcccgcccgttcccgctgattcgcaacaagtcgttaaacattgcggccctcgttcagaagaagggtgatgagaaggagaaagatctcgaatttgcgatggttcaggttccgtctgtgcttccgcgcatcgtggagctgccggagggtgaggatggagagcaccgtgtgatccttctcgaggagatcattgagcgcaatatgaaagatctcttcctgaactataatatcgtgagtgcgcatccgttccgcatcatgagaaatgccgatttcaccctcgatgaggaggaggcagaagacctgcttgtggagatccagaaacagctcaagaagcgccagtggggcgaggttatccgtcttgaggtcgaggagaaagttgaccgtcgtctgttgaagattctcaagcgcgagctctctgtcggtgaggaggatatttacgagatcaatggtccccttgatttgaccttcctgatgaaaatgtatggaatggcaggatttgagggactcaaatccccgtcttacacgcctcagccggttccggaattaatgaattacgacgatatttttgcaaacatccgaaaaggagatattctccttcatcatccatatgagaccttcgatccggttgtgaatttcgtgcgctctgcatcgaaagacccgaatgtgctcgcaattaagcagacgctttaccgtgtcagcggtcattctccgatcgttgcg

SEQ ID NO: 431 - DNA, 612 bp, Unknown
  BMI gene
  misc_feature: SEQ ID N?1026485
aatgcagaagttcgagagagaaaccgtcttgcgagagaaattcacgatacacttggtcatgcgctcaccggaatcattgccggagtggatgccgcggtgatgatgatggatattgctcccgattccgcaaaaaaacagcttgagaaagtgtctgaggtcgcgcgtgagggaatgacggatgtcagaagatcgatgaacagtctgcgcccggatgcgctggaaaaactggaacttgaagatgcaattcgaaaaatgctcaaagatatgggggagacggcgaaggtcgagattgtttttgacaatcaggtgcatccgctgaattttcacgaagatgaggaggaagtgatttaccgggtgattcaggaagccacaacaaatgcgatccgtcacggaaaggcgagctacataaagatcggaatcagcaaggtcgatcagtggctcacgattgccgtgaaggacaatggctgtggatgctcggaagtaaaaccgggattcggtttaaaacacatgagagaacgccttgcaatgctcaatggaacacttgagtgtagcagtgagagtggatttttggttgcggcaaatattccgatcagatggggagaacgaaactga

SEQ ID NO: 432 - DNA, 243 bp, Unknown
  BMI gene
  misc_feature: SEQ ID N?1027655
gttgcggttattgacggtgtgaagggatttacgggcgctcaggttgagtctccggatcttcgcgcaggtgcggccctcgtgctcgcaggactgtctgcagccggatacaccgttgtggatgagattggctatattcagcgcggatacgagaagtttgaggaaaaattgcaggctctcggcgcacatattgatatcgtggattctgagaaggaagcacagaagtttcgcctgaagatcggttaa

SEQ ID NO: 433 - DNA, 435 bp, Clostridium asparagiforme
  misc_feature: SEQ ID N?1029915
acgctgtactatggagatgagaccggagtctgcgggtggaccgacccggataaccgcagaacctacccatggggacatgaggattttgagctgattgagtttcatcgatatatgattgacctgcacaaacgccttccggcgcttcgcagaggttcggtcaaggagctgcttgcggatcgccagctgatcgcctacgggcggatgcgcggggagaacaggtgcgtgattgtgatcaataaccgcagagacagccgtgttgttcatgtgccggtttgggagcttggaatctcggatcaggagacattgacgagaatgatgctctcgcatgcgcagggctacaatgccggacagatcgcctatcacgcggaggatggcgtgctgacgcttgagcttccggcgagcagtggaattctgctgacgacagggcggtattga

SEQ ID NO: 434 - DNA, 507 bp, Clostridium asparagiforme
  misc_feature: SEQ ID N?1031162
atgagtgacaacaccaagaacattgaaatagcacaggaaaaatttgcagagctgatcaagtctgaatttgagcgtatcgagcgcatgaagcaggacaacgagatcaaggatttctccaagcaggagaagatcgtcatcggcgtactgcctggcgatggcattggtccgatcatcatggcacaggcactccgcgttctgaagactctgatgaaggatgagctggaatccggaaaggtggagatccgtgagatcgaaggcatgacgattgagcaccgagcagagacccttcagagccttccggatgaggttctggcagaggttaagaagtgtgatgttatccttaagggaccgatggtaactccgagagctggcgatctgtggccgaacctgttaagcgcaaacagtcttctgcgccgtaacctggagctgttcgtccgatcaggattccggagaagaacatcgactggaccttcttccgcgagaatatcgagggcgagtacatctggg

SEQ ID NO: 435 - DNA, 1158 bp, Unknown
  BMI gene
  misc_feature: SEQ ID N?1031793
gcctacgatgccgttgccatctcttattataataatgcggtgctgaagctgctggacaactctgcgtttcagggcaacgccagcaactatgtgatctaccgggatggccgggtcgtcatcgacaattccgtaaaccgcaagaaaacgatctacaacttcattgcgatgctgcgcgactcttccgacctttccgaggaggagatccttacgctttcggatgattttgcgcagggccgcagcggaaacatgaaggtaaagctgggcgataccagttattatctggtctacgagggcacggcggtgcacaactggacgatggtggggcttgtgccggtcaacatcgtcaacgccagtctggacaagctgtggttccgcacggcacagatcgtaacgggcatcgtcaccggtcttgccgccgccatcatcctgctcatcctgcgccggaaccgcaccaccctgcaccagaaaaataccgagatcctgtaccgtgacgagctgttccagaagctctcgctgaacgtggacgacgttttcctgatgctggacgcagagacctccaaggtggattacgtcagcccgaacgtcgagcgcctgctgggcatcccgtggaaagaagtccgccaggatgtctttgtactggacaggctgcacccgaaaggctccccggcgcacggcaaaaacgttctggaagggcttctcagcgggcagcagcgcgaatgggatcttgagtatgagcatcaaaagaccagggagcgccgctggttccataacatcgccataggcagcgaggtagagggccggacgaagtacatcctggtgctgtcggaccgcaccgccgataaacaggcgaaccaggccctctcggaggccggtgcggccgccgagaccgccaaccgcgccaagagcaccttcctttccaatatgtccctcgatatccgcacccccatgaatgccatcatcggcttcaccacactggcggtcagcaacatcgacgacaaggaacgggtgaaggattacctcgctaagaccctcgcttccagcaaccatctgctctccctcatcaacgatgtgctggatatgagccgcatcgaaagcggaaagatccatctggaagagaccgaggtcaacctctcggatgtgctgcacgacctgaagacc

SEQ ID NO: 436 - DNA, 195 bp, Faecalibacterium prausnitzii
  misc_feature: SEQ ID N?1032957
aaagcccgcctgcccacccatatcaatatccgggcagcggacaccggccttgccaaggacagcgtcgtgctgctggagcagatccgcacgctggacaaacaccgcctgcgggagcgcgcagggcagatcacgccggaagaccagaaacgggtcaatcaggcactggatgtcagcctggggctggatgcctactga

SEQ ID NO: 437 - DNA, 633 bp, Lysinibacillus sphaericus
  misc_feature: SEQ ID N?1036305
atggaaaagaatcagctgatcctttcagtcaaggatttgaacatccaattcaacctgcgtggaaaagcgctccacgccatccgcggcatcgatctggacatctaccatggcgaggtcctcgccatcgtaggcgagtccggttcgggcaagagcgtgttcaccaagagcttcatgggcctgctggacgccaacggttccatttccagcggcaccatcgactacttcggtgccgacgacggaaagcccatccgcctgtccgacctgaaaaaggaaaaggactggctccgggtgcgcggccacgagatcgccatgatcatgcaggaccccatgacaagcctgaacccgctgaagaccataggcgaccagatcatggaagccgtggagctgcatcagggcctgcgcggcaaggccgccagagagaagacgctggaatacctgcgggatgtcggcatcgccgacccggaggtccgcttcggccagtacccgcacgagttctccggcggcatgcgccagcgtgtggtcattgccattgcggtggcctgcaacccgcagatcctgatctgcgatgaaccaaccaccgcgctggacgtgaccatccaggcacagatcttgcagctgctcaaggagatgcag

SEQ ID NO: 438 - DNA, 882 bp, Faecalibacterium prausnitzii
  misc_feature: SEQ ID N?1038549
ttctggatgggctttgtcgggctgatctgcaccaccgtgctctgcctcttcgtattccacagagccttccgggagcaggcatgggcggcgctggaaaacgaggccagcctcgttgccgccgggtgcgaacagatcgacgaccctgcccagctctccgcctatgtcaacggcgatctgcgcatcacgctcatcgcctcggacggcagcgtcctgtttgaatccgcgaccagccagcagatggagaaccacctgggccgcccggagatccagcaggccaagcagaaaggcgtcggccgcgaccgccgcgactcccagacgctggggtatgagacgtattactacgccatgctcctgccggatggcgacatcctccgtgtggcgcaggattccgagaccatctggtccatctacgatgcggccctgccggccatcgtgctgagctgcatcgtgatgatgggcgcagccgccatgatggccggtctgctgacccggagccttgtccagcccattctgaagatgacggacgatctggaacacatccaggaaaatgtgccgtacaaggagctgatcccctttgccgagagcatccactcggaccgcctgctccgcgagaacaacgaaaagatgcggcaggagtttacggccaatgtcagccacgagctgaaaacacccctgaccagcatttcaggttatgccgaactcattgagaccggcatcgccaagtctgcggatgtgccggagttcggccggaagatccatgtagaagccagccggatgatccagctggtcaacgatatcttgcagctgtcccatctggacaacgtttcggagaccaacgacaccccccagatggagacggtcgatctgctggatgtggccaag

SEQ ID NO: 439 - DNA, 744 bp, Faecalibacterium prausnitzii
  misc_feature: SEQ ID N?1038782
atgacgaacaccgatgccccttcctggctggacgggatgctccgcaaggatgcggtgcgcagctggaacgtgatggcgatcacctttacgaacaaggcggcaggggagctgaaggagcgcctgcggaacatgctgggcggcgaagagggcgacgaggtgttcgcctccaccttccactcggcctgtgtgcgcatcctgcgccgctgggccgaggagatcggctacccccgcagttttaccatctacgacaccgacgacgcccagcgcgtgatgaagagcgtatacaaagagctgagcatcgacgacaaattctttccggtcaagagcgccatcaaccagatgagccgctggaaggaccagctcgtcagccccgaagaggctctgcgcaccccggcgcgggatacgaaaggggcgctggcggccaaggtctatgcggcctacgaaaagaagctgaaggatgccggtgcgttcgatttcgatgacctcatctaccagaccgtccagctgctggccgggcacgaggaggtgcggcagttctaccagaacaaataccgctacctgctcgtggacgaataccaggacaccagtgtggcacagttccgcctggtcagcctgctcaccgggccggaaaagaacatctgtgtcgtcggcgacgatgaccagagcatctaccggttccgcggtgccaccatcgagaacatcctcaactttgagcgcatctatcccggaacaaagaccattcgt

SEQ ID NO: 440 - DNA, 240 bp, Faecalibacterium prausnitzii
  misc_feature: SEQ ID N?1039604
ggcagccccggcctgggccgcaagctgacccgcccggaacattacgaggccgtcaaggggcagaaggtcagcgtcaggctgttccgcgccaacgagaacggcaccaaggagttttccggcatcctgaccggccgcgagggcagcaccatcacggtcgagacggagaacggcaccgtgaactttgaagcgtcggccgccagcaccgtgcgtctgtgcgacgacgaggatctgtttgactga

SEQ ID NO: 441 - DNA, 687 bp, Faecalibacterium prausnitzii
  misc_feature: SEQ ID N?1039739
atgttccctaccctcaggcaggaaccctgcatccacccatttcagacaacaaaggagatttttacgatgcgtgcgatctttgaaacgctttttgacattttttatctgctcaccgtcctttccgtgggcatccgcatgatccggaacagcaaaggctccgcccagttccagctgtttggctggatggctgtggtgctgggtgccggtgattccttccatctggtgccccgcgcactggctctgtgcaccaccggccttgacagctacgccttccagctgggtctgggcaagtggatcacctcggtaaccatcacggtgttctatgtgctgctgtactacgtctggcgtcagcgctaccacatccagggccagaaagccgtgacctgggccgtctacgctctgtcggctgcccgtgtgatcctctgcatgatgccccagaaccagtggctcaccaaccattctcccctgtcctggggcatctaccgcaacctccccttcgcgctgctgggcctgctggtcatcgtgctgttctaccgcagcgccaaagagcaccacgacactgcgttccgctggatgtggctcaccatcgtgctgagcttcggcttctatatcccagtggtgctgtggggcgatgtgatcccggtcatcggcctgctgatgatccccaagacctgcgcctatgtgtga

SEQ ID NO: 442 - DNA, 1101 bp, Faecalibacterium prausnitzii
  misc_feature: SEQ ID N?1044361
tttgaggccggggcacgggatgtgcaggtggactggaacgacaatgccgtttcccgcagccgcatggaactgggcagcgaggaggccctgacggacttcaagccttaccagctgcgccgctatctggattacgccgaaagcgaaggcagcgtctgtgtgctgcacctcatcgccgatgatccggaggtctacgccgggttggacagcgccaagatcagccgggtgaacgccgccaaccggaaattcatggccccgtggcgggagtacaccatgaacgaccgggtccagtggtccatcgctgccatgccgagcgcgccgtgggcgaagaagatgttccccgacctcgacgccgatgcggccatcgagaagctgtggcagctcatcttcgatgtctgccgtgtgaccggcggcgacccggtgggcgagtggaaagcacacctcgaccgcctgatgaccctgcgcgacaagatgaacgcctttgacctcgaaagcgtccacttcaagagcagcaacggcaccgacctgaccgtcggtcttgccgacaaggccagctgggagagcgccggcagcaggaacgagaagggtgtggagttcctgcccaacatccccaccgaagaggtcttcaccgcgccccacaaggacaaggtgaacggcgtcgtctacggcaccaagccctacgtcttcaacggccagctcatcaagggcttccatgttaccttcaaagacggcaaggtcgtggagcatggcgctgaggatggcgctgacctgctgggtcagctgctggacaccgatgagggtgcccgcagcatcggtgaagtggcgctcgtgcccgcttccagccccatcaaccgcagcggtgcgctgttctacagcaccctgttcgatgagaacgccgcctgccacaccgccttcggcgccagctatcccggcaccacggccgacggcacccgcctttccaaggaggagctgctggagcgcggcatgaaccagtcggccatccacgaggatgtcatgatcggtgcggaggacagcgagatcaccggcaaatgccgcgacggccgcaccggcgccccataccgcgccggcgtctgggggctgtga

SEQ ID NO: 443 - DNA, 909 bp, Clostridium bolteae
  misc_feature: SEQ ID N?1074801
atgaaagaggacatttatgttgaggtcgcaatgcagcataatgactcttatacggagaatacatattcttttgttaataatattattactccggagggcggaacacatctggagggctttaagagggcattaacaaagacttttaatgattatgcaagaacaaataaattgttaaaggacagtgagcagaacctgacaggagaggatatcagggaaggtctgacagcaattatcagcattaagattccggaaccgcagtttgaaggccagacaaaacagaaactcggaaacagcgaggcgagggcagcagtagaaaatgttgtaagtgaacagctcaggtattttctggagcagaatccgcaagcggcaagaagcatctgtgagaaatctattcttgcacagagagcgagggatgctgcgagaaaggcaagagatctgacaagaagcagaaaaactgccctggatggaaatggattacctggtaagcttgcagactgttccgacaagaatcctgcaaattgtgaaatcttcatcgtcgaaggagattccgccggcggatctgcaaaaacagcacgaagcagggcaacacaggcaattcttccattgagaggaaaaatacttaatgttgaaaaggcaaggcttgacagaatacttggaaatgcggaaataaaggcaatgataacagcctttggtacgggaatccatgatgattttgatcttgagaaattaagatacgataaaattattattatgacggatgccgacgtggacggggcacatattgcaaccctgcttctgacatttttatatcgttttatgccaatgctcatcaagacaggacatgtttatcttgcaacaccgcctttgtatcaggttacaaaaaataaaaaggtgtggtatgcatattca

SEQ ID NO: 444 - DNA, 372 bp, Syntrophomonas wolfei
  misc_feature: SEQ ID N?1078399
gtgatcgtgaccaacagcaaccttgtcttggcagactgtcctcagatgatggaggaatctactatgaagcagtctgacaaaattaccgcgctgtattgccgcctgtcccgtgacgatgaatcacagggcgacagtaacagcattgtgaatcaaaaagcctatctcagccgatatgcaaaggaacacagcttccgcaatacggagttctttgtagatgacggctacacaggcgcaaactttcaaagaccggattggcagcgcatgatggcgctggtggaagaagggaagatcggcacggtcatcacgaaggattattgtgcgataataggactaaatcagaaagaccttgaaaatcaaggcattctggcttag

SEQ ID NO: 445 - DNA, 615 bp, Unknown
  BMI gene
  misc_feature: SEQ ID N?1078918
aaaatagttgataatctttccggtggtgaaaaaatgcgtctagtattatcgacactggttgaacaaaaatatgacattttagttctcgatgaaccgacaaaccatctcgatatgatgactaaagaagaactgattgaagccattggaaaatataaagggtccatcataatcatttctcacgatcgttcatttgtcgataacctctgtaattgtcttctttattttttaaaaaataaagcttattattatcaaggcgattattcgcatttcaaagttgtaatgctcgatgatatcctccaagaaaagctcgatatcgaaaaagctcgtttggaagaagaaagaaaacaagataccttatatcatctcgaacttgaaaaagctcgtgttaaattcaaagatgataaaccattaaaacctcgtccaaaactagcaaaaaataaaatcgaagaaaaaatggctcgacttgaaaggcttatcggagaagatgaagttaagctagatgacccagaatactattgggatcaatcaaagctcaacgccttacaagaggagcttgataattacaataaagaatacgaagaattgatggaaatgctttctttatatgaccagtaa

SEQ ID NO: 446 - DNA, 384 bp, Unknown
  BMI gene
  misc_feature: SEQ ID N?1079333
atgaaaagagtatatagaatcacattcctcacagttgcagccgtaattatatgcgttgtggcagcacaccagttcttattaaaagaagatgcacaaaaaacaataaaagtaggcttcctgtacgttggagatgctacgaccacttacaccaacaattttatcaaagcccagatagcagtcgaaaatgaatacggcgaccgggttgaggttatcgcaaaatacaacattgcagagggaacggaagaaaagcctctgcaggagcttgtggatgccggctgcgaactgatcttttccaccagttataattatggtgtgaccacgaaagaatttgccgaacgttatccggatgtgcaattctgcatggcaacctgtgccaatgcaaat

SEQ ID NO: 447 - DNA, 651 bp, Unknown
  BMI gene
  misc_feature: SEQ ID N?1083008
atgctgtcagggtataagggcatacagaattatgagctgatactggcataccagaaggatcagagagagtacatcaatataatcagcagtcaggtattggggaaattaaagcccgtatattatccaatggaggaggtcggaaatacaggcagggtatataatgcagcagcgcgactggcaactgcagacgcactgatcttcatggatatgcagatggtgctgatacagggatgcctggatgagatgatgaaatccctggaagaggacagggtgctggcagtgcagccaatgattataaaatttcattcagcactggtaaagagtacgggatatgtattttccgaaagcagtacggggcatgcacttcagaacaggcagataaaggatgagattgtaaataaatcatttgagagaagtgcattgatcacatcactgatggcagtaaaccggctggtatttgaggaattaagaggctttaacagtaattttcccaaagaatggctgggaagagagcttaccatgagaattaccatgaagggatataagaatatgtataatcatcgggcaagagcatatgatatggtggatgaaagaggaatgtgtgaaacaggtctgattgataatttctggtttccaaggagaaaagagtgt

SEQ ID NO: 448 - DNA, 603 bp, Ruminococcus lactaris
  misc_feature: SEQ ID N?1083232
atgaacacaatcgcaagagaagaagcagtagaattattaaagaaatacaataaggacccatttcatattcagcatgcctatacggttgaggcggtaatgaagtggtttgcaaaggaactggggtatgcagaggatgctgagtattggggtattaccggacttttgcatgatattgattttgaactttatccggaggagcattgcctgaaagcaccggaacttttgcgtgaaggcggagtcggcgaggatgtgattcatgcggtatgctctcatggatatggtattactgtgggatgtggaaagaccattgatgtcgaaccggtgcatgaaatggaaaaagttcttttcgcggtggacgaactgaccggacttatctgggcagcggcattaatgcgtccatcaaaaagcacaaaggatatggaactgaaatccctgaagaagaaatataaaagcaatggatttgctgcgggttgttccagagaagtaattgcaagaggcgcagaacagcttggatgggaactcgacgagattctgtcaaagacacttcaggcaatggcggagtcagaagatgtgattcgtgaggagatggatgcggaagcataa

SEQ ID NO: 449 - DNA, 609 bp, Roseburia inulinivorans
  misc_feature: SEQ ID N?1087413
atgaaaaataaggggatatcagggatgagaataggatttgacaatgacaggtacttaaaaattcagtcggagcacatcaaagagcgaatcaaccaatttggggacaagctttatctggaatttggcggaaaattatttgacgattatcacgcatccagagtcttgccgggatttgcaccggacagtaagctccagatgctgatgcagctttcagatgttgcagaaatcgtaattgtgatcagtgctgcagatattgagaaaaacaaggtgcgtggagaccttggcattacttatgatgtggatgttgtccggctgatcggagagtttgagaaaaagggtctgtatgtgggaagcgttgtcatcacgcagtttgcaggacagagcggtgccgtacagttccgtgaaaaactggaaaaaagaggcattaaagtatatcagcattataagatcgaggggtatccgtcgaatattccactgatcgtcagcgagaatggttttggaaaaaatgattatattgagacgacaagaccgcttgtggttattactgcgccggggcctggaagcggaaaaatggcaacctgtctttcacagctttatcatgaaaacatt

SEQ ID NO: 450 - DNA, 201 bp, Eubacterium siraeum
  misc_feature: SEQ ID N?1090984
atgaaactgaaaaagtggctgccggcactggcggctttcgcggcgatggtcgtgctatgcgcggtgtgtgcaggagcggaaacctatggagaccttgagtacagcgtgcttgacgacggtacggtggagattaccgattataatggtagcgcaaaaacagttgatattccggagaagatcaacgggaagagcgtgacgagt

SEQ ID NO: 451 - DNA, 228 bp, Clostridium hylemonae
  misc_feature: SEQ ID N?1091819
atgttatgtgcaaactgtggtgcaagagctgaaaaaggttttacgacaagtgttaccgatttaggcaattgccttataattataaggaatgttccgtgttataaatgtactcagtgtaatgaagtaatctatacgggcgatgtgttgaaaaaaaccgaagagatcatagagcattgcaggaagatgatgcaggaaatttcgatcatagattactcaaaggtcgcgtga

SEQ ID NO: 452 - DNA, 2091 bp, Unknown
  BMI gene
  misc_feature: SEQ ID N?1093507
atgattaagctaggcaaatggataacaaagcacagagtaatcattcttattgttgcggtcgtactgctgataccctcggtactcggtatgatcgcaacaagaataaattacgatatgctaaattacctgcccgatactatggaaaccatacagggtcaggacattctgctgaatgacttcggcaagggcgcattcagtatgataattgtggaggatatggaaccgaaagatgtttccgctcttaaagaaaaaattgaagcggtagatcacgttgattcggtgatttggtatgattcgattgcagacatatcaatacctatggatattcttcccgataagataaaagacgcattcaataccgatcattcaacagtgatggcggtattctttgatacatcgacatcagccgacgaaacaatggacgctatcaacacgataagagatgtaacgaacaatcagtgtttcgtttccggtatgtccgcaatggtaacagacctcaagaacctttgtgagcaggaagagccgatatatgtcgctatcgcagtagttcttgcggtagtagtaatgatgctctttatggattcgttcctgataccgctcatcttcctcgcaagtatcggtatggctattctctacaacctgggcagtaactacttcttaggcgagataagctacataacaaaggcactttccgctatcttacagcttggtgttacaatggactactcgatattcctctggcacagctataacgagcagaaggtaagatttgacggcgataaggaacgtgcgatggcacacgccatttcaaacagtatcatttctgtagcaagctcgtcgatcacaacaatagccggatttctttcaatgtgctttatgagcttcacgcttggtgcggaccttggtatagtaatggctaaaggcgttgttttcggacttatcggttgcgtaacaattcttccgtcacttatccttgtattcgataaggctatcgaaaagacaagacacaaacagcttatgccgaagtttgacaaggtggcaaggtttataacaaaacgttcatggatattccttataatattcgctgtacttatcggacctgcggtttacggttataacaacacacagaaatattacgatctgagccagacaatgcctcaggatatggacttcgttatcgccaacacaaagctgaaggacgatttcggaatgtcgaacgttcatatgatactcgcagattcaaagctgtcgcagaaggacgcaaaggcgatgcttgacgaggtcggaaaggttgacggtgtaaaccttgcggtaggctttgattcacttatcggctcggctgttccctcagagatgatccccgattcaatatccgaagtgcttaagggtgataagtatcagcttatgcttgtaggcagtgagtacggtacggcaacagacgaagtcaataatcaggtaacagagataaacaacattataaagaagtatgacagctcggcaatgcttatcggtgaagctccttgtacgaaggaccttatcgaagtaaccgacagggacttcaaggtagttgacgttatttcgatagcagcaatcttccttatcattctggtaaccttcaagtcggttacactcccgctgatacttgtggcggtaatcgagtttgctatctttgtaaacctcggtattccttgttacacaggtacagagcttgcattcatcgcacctatctgtatcagtaccatccagcttggcgcaaccgtcgactatgcaatcctgatgactacaagatataaaaaggaacgtaataagggtaacgacaagaatgaagcggtttacacggctcttaaatcttcaataccttcgatcatcgtaagtgcgctcggattttttgctgcaacattcggtgtaggtatttattcaaatgtagatatgataagctcgctgtgtgctcttatggcaagaggcgctatcatcagtatggtatcggtaatcctgttattacccgctatgctcaagctcttcgataagataataatccacacgagccttggtttcaaggaagcaagagaagccgataagaaaacgaactga

SEQ ID NO: 453 - DNA, 495 bp, Eubacterium siraeum
  misc_feature: SEQ ID N?1093508
atgatattcgcacttatattcattgaaagtctggcggcaagctttattctgcttctgggctgtgttgtcggcattgcaaaaaacaatgtcaatctcgtctgcttttatgaaaaaccggtatgggacagggtaattgaaaaagggcttatcaccaaaaagcggatcataaagaacgcaaacctgttcaagcttttctcggttttaccgctacttgtggtcacgcttttctgcgtgtattacataaacggtgcgaggggctttcttgaaggcttctggcagatcaccgctatactgataatatcgggactgtttgatagatttttcattgacacctactgggtgggtcacacgaatgcgtggataattcccggtacggaggatctgatgccgtatatccataaaaatacgatgataaaaaagtggctgttgacgcttgtcggatttcctgcgatatcggcgatactgtcggctgtaatgatgatatttatacagtaa

SEQ ID NO: 454 - DNA, 174 bp, Eubacterium siraeum
  misc_feature: SEQ ID N?1095878
atgatattattaagatataacgattttagcacaggcggtgaattatttttgaaattctacgattatccgataatcagcaaagaaagcagtcttcctgtatttttggtgagcgtagggctgaacgaatggcagtatcacgttaaatgcgacaaaggtgacaattatgccaaggct

SEQ ID NO: 455 - DNA, 765 bp, Eubacterium siraeum
  misc_feature: SEQ ID N?1096559
atgaatttacttgaagtaacgggacttaaaaaggtctacacacagcggctcggtgcaaagccgaatgtcgcactgcgaaatgtcagcttctctgccgcaaagggcgaatatatcgctattatgggcgaaagcggctcgggcaagacaaccctgctcaatatacttgcggcacttgacaagcctacggcaggcgttgttatgctctcaggcattgacataacaaagataaaagacagcgactctgcgcttttcagacgcgagcatctcggatttgtatttcaggatttcaacctgctcgatacattctccgtgcgtgacaatatttttctgccgctcgtgcttatgggcaaaagctacgatgagatgaactcaaggcttctccctcttgccgcaaagctcggtataagcgacctgcttgacagatacccttatgaaatatcgggcggtcagaagcaacgcgttgctgtcgcccgcgcgcttataacaaaccccgatattctgcttgcggacgaacctacaggcgcactcgattcaaaagcatcggaggagcttctccgtctgttcgatgaaataaaccgtgacggtcagactatacttatggtgacccattcggtaaaggcggcaagcagcgcctcacgcgtgcttttcataaaggacggcgaggtttatcaccagatatataaaggcgtttccaccacggaagagttttatgccaagataaacgatacgctgacggtgcttgtggcaggcggtgaccgcagatga

SEQ ID NO: 456 - DNA, 204 bp, Unknown
  BMI gene
  misc_feature: SEQ ID N?1098186
atggcaagcttgcatcttaaagcctacggtgagtatgtgcaggagctgcgttatgccttggaattggaatgcagcaggaaagaggcgtacacatacggcacattgagagaatggaaatccattgacggcaagatccgaaaaacggagcgtaattttgcgagatttctgagaagcaataaaagccttgcaaaaacaaaaggggat

SEQ ID NO: 457 - DNA, 246 bp, Unknown
  BMI gene
  misc_feature: SEQ ID N?1098187
ttggacggcggagttccgcccgaggaaatcagtcatcattacagcgatctgtatgtgaaggtgtctctcaagtctaaaaggatattggaagaattccgaaagcagagcagtatacgctgctttgctgaaattttcaaggcgaatgacggcagcggtgattggtatgacatcgcatttgcatacgacccgttttgggaagaagctgcaaagaaagggagaaaattatatggcaagcttgcatcttaa

SEQ ID NO: 458 - DNA, 648 bp, Eubacterium siraeum
  misc_feature: SEQ ID N?1098885
ttgtcgaaaagcatcaacatatctaactcagtaatacgcagacttccccgctactaccgctttctcggcgaactggaggatcagctgatctctaaaatttcttcaagggaattgtcggagagaatgcacattaccgcgtcacagataaggcaggatctcaattgctttggtggtttcggacaacagggctatggctacaatgtttccgagcttcgaaaggagattggccgtatcctcggagttgacaagcacagaaaaaccattcttatcggtgcgggtaatctcggtactgctttggcagttcatatcaactttgaaaagagcggatgcagccttgtcggcatattcgactccaacaaaaaaatagtcggcaatcctctcggaaagcttaacatcactgatatagacgaccttgaagacttctgccgtgaaaacaagccggaggttgcagttctttgcattccgaaatcggtcactaaagagatagtagaccgacttaccgagcttggcgttagatcgttctggaacttctcccactatgatattaacgttgagcacaaaaacataatcgtggaaaatgtacacctcggcgacagtttgctgacgctttcatacggtgtcaataatgatcttgacaacaacaaataa

SEQ ID NO: 459 - DNA, 390 bp, Bacteroides capillosus
  misc_feature: SEQ ID N?1099121
atgaaaaacaaagcacttttagaggtcaatcgcctgcacgtcagcgcgggggaaaaggagatccttcacggcgttgacctcacggtcgggcgcgacgagacgcacgttctcatggggccgaacggcacgggaaaatccacgctcatcaagatgatcatgggcgaggagtaccccgacgagggccgcatcaagctcggcccctcgacgaagatcgcctacctgccgcagatcattcacttcgacgtgccgcagcgcaatcttgtggacacaatgctttattccaagcgggacatcacgccgcagaaggcgcgcgaccgtctggcggcgttccacttccgcggagaggacgtgttcaagtctgtttccgtgctctccggcggcgagcagagc

SEQ ID NO: 460 - DNA, 348 bp, Unknown
  BMI gene
  misc_feature: SEQ ID N?1099229
atgagtgatccgaccaaagaaaaaacatacagcagcgagctgaccaagatgcgcgactacatggtaatcaagtccaacgacctgatccaaaagtcccggtttgacctcagcacacaggaacaaaaaattatcctgtacctgatgagcaaaatccgccccacagataccgagctgcacgaatacgaattcagcatcgtggagttctgcaaagtctgcgggatcgattacgccaacggtaaaaattacggcaatatcaaaaaaaccatcaaatcgctcaacgacaagtcgatctgggtcaaactcgaagacggcggcgaaactaccatgcgctggatcgagcgcccgtat

SEQ ID NO: 461 - DNA, 177 bp, Unknown
  BMI gene
  misc_feature: SEQ ID N?1099254
atgtttgacgagaactgggaaattggtgaggacactgatgcatactcctataaaacaggttcgactgcaacgctctgcttttacggaactggtgtacgctggattgggcaaaaggagcgatgctttggagaagcaaatgtttaccttgatggtgtcgaacaagcaaatgtgaacagc

SEQ ID NO: 462 - DNA, 126 bp, Unknown
  BMI gene
  misc_feature: SEQ ID N?1099472
aagtacaacaaatttcggctcttcgcaccaaactcaattatgagaaacagcaatgaaaaaataagcgattcaatatcattgtataacaaatcttgtcttataaaaaaatggagggaaatgccatga

SEQ ID NO: 463 - DNA, 2877 bp, Unknown
  BMI gene
  misc_feature: SEQ ID N?1100532
aagtcacttactgaatgtgactcagatgtatttgcagacagtggacttacaactgttacatttgaaaaaggtacaacaaagatcgcaaacagtgcgtttcactcggcagataaacttgtaagtgtgacaatacccaatacagttacttcaataggtaatagtgcattttacggttgcacaagccttgaaaagatagaactgcctgattctgttacaagtatagagcaggacgcgtttaaagaatgtacaaagctgtcgcagatagatctgcccaaaaatctcgaatatatgggttcgtgtgcatttatgaattgcacatctcttacatcggttgaaatacccaagtcgcttacagactgtagatgggacgtatttacaggtagcggtcttacaactgttacatttgaagaaggtacaacaagaatcgcaagcaatgttgtcacctccgtgtccactcttataaatgtgacaatacccgaaactgtaacttcaataggcagttatgcttttgccggttgcaacaatcttaaaaaaatagtaattcccgaatcggttataagcattgatgagggtgcttttaatcagtgtaaaaaattgtctgaagtcaatttgccgaaaaatctgacaactttaggtcaggttgtattcggagaatgcgaatcgctcaaaactataaaaataccaaagtcgcttactgaatgtgattggagcgtattcggtaaaagcggacttactaccgctacatttgaagaaggtacaacaagcgtagcggacagattgttcaataatgcaagtaatttaacaaatataaccatacccgatactgttacaagcatcggcagtgatgctttttcaagctgcagcagtctgcagaagatagatataccggactcggttataagtatcggtgaaagtgcattcaatctttgcgataaattatcggaaataaccttaccgaaggatcttgaaacgcttggtagcagtgccttttcaggttgtacatctcttacgtcaatttcagtccctgaaaacataagtaaaattcaagattctatgtttgatggttgtacatcacttgtgactgtggaaatgggcgataaagtcgcatcaataggcaacaatgcttttaacgactgtacagcacttaaaaatataacgctttcgcctgtaacagaatatataggttcttctgcattcagtaactgcgattcgcttgaaagtatagtaataccggataaggttactgcgatatatagcagtgctttcagtgactgtgataagctgtcatcggtgacgctttcaaaggcgctagagcgaattggtgaaagcgcattcaacaactgcgatatgcttacatcaataaagataccggattctgttaaaacaataggctacatggcgttctatgattgtgaaaagcttgcggtcgtggatatgggtaacggagtttcatggttatattccgaggcgttcagactttgccccgcgcttacaaaggtagtgctgtcaaataatcttacttctataccggagtatgcgttcgctgactgtgtgaatcttacagacgtaacgatatatcccggcgtgacagagatcgcgaccaatgctttctcatatgcttcaaaggttacgatgagaggtcttaagggaagctatgcggaaacgtatgcgaacgacagaggtatgacatttgaagcaataacatctgtcaatgcaagtgagcttacaatcaagtacaagtcattaacgggttcatattggaatgattacattgaatacatacctgaggcaagctatacctatacaggtgaagccataaaacctgagataaaggtatattttggctcttacgaactgaccgaaggtacggactataagcttgtatcatatgaaaataacgtaaatatcggaaatgctgtgtgcaccatagaaggtcttggtgtatacagcggcaagacatcgagcacttataaaatagttgctgccgatatatccgatttcgatttcggacttgagtacggctcattagactacaccggtaaggaaataaagcctgctgttacctgtgacggacttacagagggcattgactttacggtaagctataaggataatatcaatgcaggaaccgcgaaggctataattacaggtatcggaaactacagcggcacatacacgcttgaatttacgataaatcccgttacgatatgcacagatgtatcacagcttcagagcaagcacccttatgacggaaatgtacatgatgtatatgtttataacggagctgagggcgctaaaaacttgtatctgacattctcagacgatacacagtttgaagcatacaacgactatctgtatatctatgatgttgacggaaatctgatcggagcatatacagacgatgagctttcaggaaagactataagagttcccggaagctatgtaaagcttgtgcttaataccaattcttcaaataacgaatacggtttcagagtagtttcagttaccgattcgattgaatgcacgacgcatacatttggtgactgggtgataacagaagaaccaacctgtacgacaacaggtactcagataagaatctgctcggtttgcaaaaaggttgaaattgcaaccattgcaaaggtggctcacaagtatgtgaatacggtagttaagcctacttatacagcacagggctacacactgcataagtgctcggtttgtggaacaagttataaggatacttacacagctaagctcacacttgcaaaggtaataggcgttaagcttggtggcagggcggctgacgcgcttcgtatcaactggactaaaaacacaaatgccgatggctacattgtagaaatgtatcagggtaataag

SEQ ID NO: 464 - DNA, 462 bp, Bacteroides capillosus
  misc_feature: SEQ ID N?1101927
atggagcagaacatcattgccgtctcgcaggtcaacgaatatatcaaatttctgctcgaccgcgacgagctgctcggcaatatctgcgtgcgcggcgagctcagcaactataaagtctatccgtccggccatcattattttacgctcaaggacgcggagggcgcgctgcgctgcgtcatgttccgctcgagcgcgcagcggctgcgcttccggccggaaaacgggacacaggtgatcgcctccggccgcgtgacggtcttcccgcgcgacggcgcgtaccagctctactgttctgagctcagcgtcgagggcgtgggtgacctgcacgtcgctttcgagcagctcaaggaaaagctcttcaaggaggggctttttgccccagaacataaaaagcccttgccaaaatatcccaagcgcattgccatcatcacctcatccgcgggcgcggcggtgcatgatatg

SEQ ID NO: 465 - DNA, 1599 bp, Eubacterium siraeum
  misc_feature: SEQ ID N?1102135
atgaaagagaagataggcagggcacaggtgcttgccgcggcggcggtgctcagaaagtacaaggaaggaaaggcggtgctcgacaagaggatagtgtcaaatgagcagtggtggaaaatgcgtcactgggcggagatagggtatgagcctgacgatacacgtcctcagcctgcatcggcgtggctgttcaattcgatagctaacaagcacgcggacgctatggataatatccccgagccgtctgtgctacccagagagcagggagatgaggagtgtgcaaggcagctgtcgctgcttctgccggcggtgtttgaacggtgcggatttgagaagctgtacagtgacggctggtggtacaagctgaagaacggtacggcgtgtcaggcggtagggggggatcctgcgcttgaggacggcaggggagatattgctataagaaatgttgatatactgaatctgttctggcaaccggggataaaggagcttgaagagagcgcaaacctgttctatgtatcgcttgtggacaaggagcagctgtgcgaaatgtatcccgggcttaaagacggtatatcggaggaaacggtaaatgtcgaaaaataccgaacagacgacaggactgacgacagcggcaaggctgaggtcgttgactggtactataagaaaacggccggcgggaagaaaattctgcactattgcaggttctgcggggacaaggtgctgtattcgagcgaggatgacgagagctgtaaggacgggttctacagccacggaagatatccgttcgttatagatccgctgtttacgcaggagggcacaccgtgcggatttggctatatagacgttatgcgggacgcgcagacgtacatagacaagctgtcgcaggtggtgctcgagcatacggtgcagatgagcagaaagagatacttcataaggcagaacagctcggtgaacgaggcggaatttgccgaccgcaggaatatgtttgtgcatgttgcgggcagtctgacaaatgacgatataagagagataaagacagagccgcttgacagcgcggtgatgagtgcgctgagcttcaagatagacgagcttaaggaaacgagcggcaacagggacttttctcaggggtcgacctcgggaggcgttacggcggcaagtgcgatagcggcgctccaggaggcgggaagtaagctgtcgagggatatgataaagggaacgtattttgcgtttcagcaggtgtgctatcttatcatagagcttatcagacagttctatgacacgccgagaagcttcaggataacaggcggttatgcggcgtttgataactcggagataaagagccgcagggaagagctgttcggggtggagcttggagaaaagaagccggtgtttgatattgtatgcacggcggctaagaaatcgccgttttcaaaggcggcacagaatgagctggcaaagcagctgttccagctgggatttttcaacccggatatggcggtgcaggcactggggtgtcttgaaatgatggattttgagggaaaggagagcgttgaacgcactataagagagggtgcgggtatgacgcagaaaaatatgatatga

SEQ ID NO: 466 - DNA, 786 bp, Eubacterium siraeum
  misc_feature: SEQ ID N?1102690
ttgaccttgtttatagatataaacgatctaagaataaattacattgatgaaggcgaagataacggcaggggagtaatattgctgctgcacggctggggcagtaatattacgctgtttaaaaacatagtagatatgctgtcgcctcatatgagagtggtcgcgcccgatatggcaggcttcggtgaaagcgacgagccgaaaaagccgtggtgcgttgacgattatgtcgactttatcggcactttctgcaaaaagctcggtattgatccgactgttgtcctcggtcacagctttggcggaagagttataataaaggcggtaacacgggaaaagcctgtgcttacccccgaaaagataatacttacagacagtgcgggaataaagccgaaacagagcgtatcctcaaaaatcaggacacggacatataaaatgggcaaggcggtaatgagtaccgcaccgatgaaaaagctgtttcccgatgccgttgaaaatatgagaaacaagcgaggcagtgcagattatcttgcggcatcgcctgtaatgagggcaacgcttgtaaaggtagtaaacgaggatctgaccgagcttttatcagaaataaagcagtcgaccctgcttatctggggcgataaagacgatgcgacaccgctttctgacggtgttaaaatgagcgagcttatacttgacagcggacttgtaacaatagagggtgcgggacattatgcgttcattgagggttggtttacattctcaagggtgcttgcgtcatttcttgatataaaataa

SEQ ID NO: 467 - DNA, 339 bp, Unknown
  BMI gene
  misc_feature: SEQ ID N?1104248
ctcatggcccccgccggggatgccctggcaaagcgcttcgccaccgaaccctttggcgaaatgagcgttccggtgctgttcaactgcctgggccgcgaaaaagccgagagcgacagcatcccggccctgctggtccggcaggtgcagagcagtgtctacatggaggattccctccgccgcatggccgccatggggctggacgcgctggtggagatcggcccgggcaaggccctcagcggctttgtgaagaaaaccgtcccggagctgcctgtgtacgccgtggagaccgcggcggagctggaacagctgacggagaccctcaaaggagcatcgctatga

SEQ ID NO: 468 - DNA, 693 bp, Clostridium asparagiforme
  misc_feature: SEQ ID N?1104317
tcaccgatactggcaaatatctacttaaatgagtttgaccaggaattccaaagacgaggagtgccttgcattcgctatgccgatgacatcgtactgcttgcaaagagtgaaagagcctcggaacggctactggaaaccagtacgaaatatctggaagaaacgctgaaattaaaagtgaatcgaaagaaaagccgtacggtcagtgtagtagcaattcgaaattttaaatatcttggcttttgtttcgggaagaacggaaaaggaatttatatccgagtccatgcggatgcatggaagaaagccaaggataagctgagaaagctcacttcccggagcagatgtggaaatgttcggaaagcaatggagcgcatcaaagtattcatgcggggatggctgaactatttcagtattgcggacatgagaagaaacatagaggcactgaatggatggctataccgaagaatacggatgtgcatatggaagcaatggaaactgccaagaacgcgaaagcgaaagttactgggtcttggactgcctgagtgggtagcctgcgaaggtgcctacagccgcaaaggatactggagaatggcaggaagcggcgtggtacaaagagctttaacaaaagaaagactggcacgctggggattctatgatttagcccttgcgtatcagtctctgcacgtcaactattga

SEQ ID NO: 469 - DNA, 108 bp, Unknown
  BMI gene
  misc_feature: SEQ ID N?1105204
atgggtgcgacattgtggcgcagttatacggtttattggacagatgtggtggtagaattctatataaacaataaaggtgaatttaaatgttatcaagattgcctaaaa

SEQ ID NO: 470 - DNA, 708 bp, Eubacterium siraeum
  misc_feature: SEQ ID N?1105612
atgaacaagaaaaagaaaatgataatctgctttgtactgggaatgataggctgtctgtgcttcggcggcggtgactggctgatgatatacggcgatacggcgcatacaggtgagcttttctggctgacacagggtgtaatcggaatatcaccgacaagaaacgcaattgcgatggcgcttgcatttccgggtataatctgctacggtatgggacttttcgcaatggcgggttttataagggacaacagggagcgaaagatatatcgtgtgctcaacatattcggacttactccgtggctgtgcctgcatattttctacatattactgcttgcgatctatgcctatatgggaagcaacggttatcggggagcagatgagatatgttacgctgtgtactcctcgttgtcgtggataataccgctttccgaagcgtttatgcttccgccgtttatctactatatgtatctgcagctcaggggaaagacatatttttcaaggctcggcggttttttcggcgcaaatgtacttgtaaattatggcgtgctgtatgctgtttcgcttattatgccggatatccccgcaagacttggattcaaaaacggactgatgagcgaaagcatgataatactctttgcggtgcttagcatctgtacggcaaaaaacatacacggtgtagcgggcgaggacggcttcacgctcattccgtaa

SEQ ID NO: 471 - DNA, 624 bp, Clostridium thermocellum
  misc_feature: SEQ ID N?1105670
cagggaatctgggggcgaacctatgccaagaacaaccggataaccaacaccaagttgctttcctcgcagatgacgagcgacgggttgtacttcaactattacaaccggaatacgttggcggaacactgctttgtgtattgcggcgacaacgcgttggtgtatgaggacgaggttcactacaaggatattctggtcggaacaacctgcaatgcactttatccgcagaccgacgtccgcaattcctcgctcgaaaatatttatgtattccgcgcggatgagcacatcattaactgcgagatgaacggttccgacaaccaaacgctgattgataacagcaccgtgaccaacctgtacgccttggacgtgacctatacgcgcagctttctgaccattgagaacgtcaagaatgcagttcctgccaacggcggatttaccctgaaaaacgtgtatctgcccgacattgacggcattcggacggtgttctatcagaatcttgcaacgggaaactaccgggtgaatctggtaaacgtttcggttgacggcgttcctgtttcgtcgatcgctccgacccggaacacgtatgcgggaaattatgcgggatatgtttttcccgaccgcaattgg

SEQ ID NO: 472 - DNA, 963 bp, Desulfitobacterium hafniense
  misc_feature: SEQ ID N?1106098
atggaagagcgcaaaaatcttaaattacgctgtaattctgaatacagacgattataccagccgatgacagcacaggagtatgaaaaacttgagtctgaactcaagaacagcaaaaatacaacagtagaaataaaaacatgggtaaatattgttttatttgattatgaaaaacttgaaatctgtaaaaaacacaatattccccatgtaggctcacgcttatatgtctgcaacagcgaggaagcgttgctttggctttgcaaaaaacaattggaacgtgaggatttagcattggaaatgcggaaatatcttatcgggaaacgctacctttacgaaaaaatactcggtgcacatacaatgtcggcacgacgtgccgcaagcagctcgaaggaaagccataaaatgaacgagccgcgctacgaatattgcgcaatgaaaacgagagagcgtttagcgaaggaatataatgtggttcatatgacgatatggaaatacagcatattcgccgaagcactggacacaatttacgatatttccgaagagcttgctactgctattatgcgtggtaacctaaaaatatctcaggaaaatgtagtagcaatttcaaaattatccgaaagggaaatactcaatatggctgaacaatttttgcggaaacaaactgatcgcaagagcctttcagatccacgaaagctcttatcaaaagcaaataccgaaaagtcagatgacaccgtttcggcgaagtcgccatctataaaagatatgccgcaatatgaccctgactcggaggcagcgagccttacgcttactattccgtcgtggataagttctatgaaccgtatcagcaacgccggcgatatgagcaaattcagcaaaggggcaaaaaacaagctccgaaacgaacttgataaactcggcgatgctatatcggatatgtatgatatgttgaaggaggaaaaaatataa

SEQ ID NO: 473 - DNA, 666 bp, Desulfitobacterium hafniense
  misc_feature: SEQ ID N?1106099
atggataatattcagcttactacaatgacagacgctcctcagcttccgtgctataacaatgaggctgatataattaaggatgactcgttcagctatgacgggtatcaggttgtacgaagcgaatttttcgcccatatttcagagccttccataagctttaacaactgtaaagtaacactgaatacagcatgtatgaagaaattgcccaatgtgagttatattcagtttcttgtaaatgccgaacaaaagaaaattgcagtaaaagcttgcacggaagatgaaaaggattcatttctgtggtgcaattccaagcgcaagccacgtcccattacttgcaggattttctttgcgaagatcgtcagccttatggaatggaatccgcagcaccgatataaaattcttgggaaaatcataaaaacgggtgatgactatctgatattatttgacctcaatgcaaccgaggtatatcagcgtattgttaaggacggcgaaaggcctaagacttcccgttcgccgatattcccgaaggactggcaaaatcaattcggattacccgttgaggaacacaaaaaacttcttcagataaatgtatttgacggatataccgtgttcggcatagaaaacgaaaaacgcaacgaaacacttgataagcctattgaaatataa

SEQ ID NO: 474 - DNA, 1869 bp, Unknown
  BMI gene
  misc_feature: SEQ ID N?1106100
atgcttgaaagtgaagcaaccgtttcaaataaagaattgcaacgcgaaaaaatcagggaacgctacaaaggctcaaattctgaattgcttgaagtaattccgggaaagaaagcgactgattattgtgacgacattgaaaggcgtgtagctgtatatgtaagagtatctaccgataatctgcaacaaaccagctcgtatgaactgcagaagaactactatgaagaaaaagtcagtaaaaatccatattggacatttgtaggtatatatgcagatgaaggtatatccggcacttctttacagcaccgtgattcctttaatcgtatgatagaagattgcaaggcagggaaaattgatatgataattacaaaaagcgtttcccgttttgctagaaatatcgtagattgcataagcatcgttagacagctttcctgtttaaaaaatcccgtaggcgtacgatttgaaacagaaggtatttatactctgaacgacaacacagaaatgagccttagcttcaccgcaacaatagctcaggaggagtcacatataaaaagctccattatgaacgcctctgttgaaatgcgtttcggtagaggtattgtgctaacacccgttctgctcggttacgaccacaatgaggacggaaaactgactatcaatgaaagcgaagccaaaacagtaaggctcatattttttatgtatctgtatggctattcttgtaaggatatagcaaattctctgactgaactcggaaggcggacaaagaaaggaaatacgatatggaacgccgggagtgttctggagatattgagaaacgaacgctattgcggcgaaatactcaccagaaaaacctatacgccaagctatttggatcataaatcaagaaaaaaccgtggggaacgagctcagcaccgatggaaaggcgaacatgagccgattatttccaaagatgattttattgctgttcagcatcttataaacaatgcaaaatacggaaacaagggtattcttcctgagttgaaagttatacccgaaggcacattgaagggctttatctcaataaatcctcgatgggcgggttttaaagttgacgattatctttacattgctaaaactgtttgcaacgaagatgaacaaagaaaaaacggtacctttcaggttgaagcgaatggcggagattttgattacagaggttttgaaattgcgagagagcagttttttaacaattccgataagttatctgttacattctccttgaaatcaatgaagttcagctataactgcgtaaaaaaactccccgacacacaatttatagaacttctcattcacccgttaaaaaagctgttgatagtccgtgcagctgacagcaaaaataagaacgctatgaaatggttgtttctcaacgaaaaaagaaaattcatctcacgacccgtaagcggtacggcgtttttaaaaacgatttacaacctgctcggttggaatgaaagttgtaaatatcgtgtccgcggaatacgaaaacaaaatgccgatgaaaatttgattatattcaaccttgaagaaacagaattatatttgccgaaggataacggactctgtaccgatgacgataaagtaacctctcttgccgaaactggtaaatcggttattgcatatccgtcagcgtgggcagataatttcggcagtaattattatcatcattcacaggcagaagaactgcaaaggatgaaaaaggaacaagattggaatatgcagcaggaaataacatcattttccgattaccttgacctgaatgtcacaagcagagaagaagtggaagataatatactgacccttatcgataatataaagatggaggaaaacaacgatggataa

SEQ ID NO: 475 - DNA, 363 bp, Unknown
  BMI gene
  misc_feature: SEQ ID N?1106101
atgatatttacctatgaaagaatgggaagaataatcaaggctgttcgtgttgaacgtgaaatatctcaggctgatttggctgaacttgttgatttgtcagtgccatatatcagtaacattgaaaccggcaagagcaaagcaagtcttgaaacaattgtaaatattgcaaatgctttgaatgtcacagttgacagacttctattcggcaatgtgcagaacagcggtgattgttcttcggaattgcgggagctgttttccgattgcagtacatatgaaaagtctgtgatattcgatacagcaaactcgataaaaaagagcttgcgtatgaacaaggaactgctgttcaagagaaaatcccgataa

SEQ ID NO: 476 - DNA, 708 bp, Eubacterium siraeum
  misc_feature: SEQ ID N?1106350
atgaactttgacggtacgacagatacactgataaagcagggcgatgaatgcggtgtttctaaatttgtggtgcagtcggtcgcaactgtaccgcatcaggtaaagcgaattaacgactttatcgtgtctgccgtgcagaaatatcccgacaggctgattggcttcggctcgcttcacccggatatgaatggtatggaagaggagatcgacaggcttatttcaatcggacttcacggaataaagctacaccctgactttcagaaattcgctataaacgatgaaaatgcctgccgtatatatgatgcagtgggtgataggcttccgtttcttattcatacgggcgataagcgttataaatattcaaatccctcgcttatggcagagatagcaaaaaaatatccgcacacccgctttattgccgcacatttcggcggctggtcggagtgggaaaaggcggagcaggagcttgtgggacttgataatatatgggtagataccagcagctcattctattcgatgactccggaaaaagccgcagagcttatcacaaagttcggcagtgacagggtgttcttcggcacggattatcctatgtggagagcggacaaggaccttgagtttctcgacaaaatcccactcggcgaggatataaaggaaaaggtgctgtggaagaatataaacagctttctcggattggggctttgctga

SEQ ID NO: 477 - DNA, 144 bp, Unknown
  BMI gene
  misc_feature: SEQ ID N?1106429
atgaaaacccaaataggaaattggcttccctctgagggggcggttccctatgcagcgcgtagtaatgaaattgtaaaaagcgggcctgatatgtgggacgatgcaagcagcggcccctacaaatcagggcaacaccgcacaatt

SEQ ID NO: 478 - DNA, 1527 bp, Eubacterium siraeum
  misc_feature: SEQ ID N?1108588
atggctaaatttaaagcggctgcggtattcagcagtaatatggttctccagagagataagaatgtaagagtattcggcacaggtaaggacggcgaaagcataatagtttctatatgcggaaacactgccgtaacgcaggtagccgatgagaagtggtgcgttacgcttcctgcaatgaaagcgggcggtccttacgagatgaagataagcaacggtgacgaaactatcgtgtttggtaacgttatgataggcgaggtatggcttgcaggcggtcagagcaatatggagcttgagcttcagaactgcacgggcggcaaggaacatcttgcaaacgacaagacggagaatgtacgttactactacacacagaagaactgcaatatggacgaaaagttcttccgtgacgaagaaaacacaggctggagctgctttgactgtgaaagtgcaagagcgtggagcgcagttgcgtatttctatgctaaggagcttgcggacagactgggcgttactgtcggaataatcggctgtaactggggcggcacaagcgcaagctattggatgagccgtgagtcacttgaaaaagataccgaccttaaggcttatcttgatgactttgataatgcagtagcaggtcgttcaagagaagaaatggacaaggagtatctcgactatgtaaagtatgaggaggagtggcagaagaagtcggtagagttctacagtgcccaccccgacggaacatgggacgaatgtcaggcttactgcggtgtaagcaagtatcccggtcctatgacacctttaaatcctttccacgctacagcgctttatgacagtatggtaaagcgtgtatgcccgtatactatcaagggtgttatctactatcagggtgaaaccgatgacaacagacctaagacatatttcaagctgttcaaggcgcttattcagctttggagagatgattgggcagacgatgagcttccgtttatgtttgtacagctcccgatgcaccgctataaagccgaccccgattggaagcactggtgccttataagagaggcgcagatgcgtaccttcaagacggtcaagaatacaggtatcgcagttatccttgactgcggcgagttcaacgagatacaccccaagaataaagtaccggtaggtcacaggctgtacttacaggctatgcaccatgtttacggcgacaacgaaacagaagcattcggtcctatctataagaatatgacagtatcgggcgacagagcggtaataagctttgaccacgccgagagcggctttgacataaagggcgacaacggcataacaggctttgaagttgcaggagctgataaggactataagcctgcgtgcgccgtaatagacgaggacggaacaataagcgtttatgcagacgaggtcaaaaagcccgcttatgtacgttatctttggacaaattacggcgatgttacgctgtacggcaagaacggaatacctgttgctccgttcagaacaagtatgaatgacgaaaagtaa

SEQ ID NO: 479 - DNA, 105 bp, Unknown
  BMI gene
  misc_feature: SEQ ID N?1131337
gaaaaccctgattttatcggggttttcaccgttttatacggcaaaattttagcgaccgattttgtagatgtaaatcggtcgttttccctttatgtaaggttttga

SEQ ID NO: 480 - DNA, 783 bp, Bacteroides capillosus
  misc_feature: SEQ ID N?1146993
ctgatccaccgggtggccaatctgctgcgctatggccggggcagcgacacggaggagatccccatcccgatctcggaggatatggtgacctttctggaggagtacgccgcccatcccacagcggatcagcagccgttgatgcagtacctgtgcgcggtggagcctgcccacccgtgggaggtgttggccatcacctttaccaacaaggcggccaacgagctgaaggggcgtctggagcggatgctgggagaggaggcccgtgacgtgtgggcgtccaccttccattctgcctgcgttcgtattctgcggcgggatatcgagcagatcggctattcccgtgatttcaccatctacgacaccgacgacagcaagcgggtgttgaaggattgcctgaaggagctggagctggacgaaaagaccttccccgttcgggagatcctgtcggttatttcccgtgcgaaagatgaaatgctgctgccggaggacttccgcgcctactgggagaagaacaacgactggcggaaaaccaggatcgcgaaagtatattccctttacacgaaaaagctccgggatgccaacgcgctggactttgacgatatcattctgctgacggtgcagctgctgcaaggccgccccgaggtgcgggagtactatcagcggaagttccgctacgtactggtggacgagtatcaggacaccaaccacctgcaatacctgctgaccagtctgctggcaggcggctatcagaacatctgcgtggtgggcgacgacgaccagagcatc

SEQ ID NO: 481 - DNA, 156 bp, Unknown
  BMI gene
  misc_feature: SEQ ID N?1148840
atgaataaaggcttgcagcgttgttcgctggcgtccatgagaggatttgaacctccgaccccacgcttaggaggcgtgtgctctatccagctgagctacatggacatttatcaaaatattaagttttatgcaagatttagactcgaaccatctacc

SEQ ID NO: 482 - DNA, 2457 bp, Ruminococcus lactaris
  misc_feature: SEQ ID N?1153439
ctgacgctgctgccgacaacagcgtttgcagcggagaccggcgcgatggataatatccccgcaaaatttgatgtggagatcgatctgtgcaacagaacgagcgacatcaacatcaaggacagcaagacatactatatctattcgtcctcaagcgatccggactttgtctggacaaagaagatccagatcaacggaaagaaggcggcaccgcacatcttcctggataacgtgaatattcaggtgaagaaggacgccaagacaccggccatcgagctgcacggaaaggcgtcggcgtatctgtactttatcaaccgggacagtaagctgacgggggccaccggacgggcggccattcagaagaaccgcagcgaggggcagctgtgcgtgcaggtgatggagggcaccacggtgacgtgtcagggtggctataaagcggcgggcataggaggaagctgggcgacccgcaatatcgcagaaagtctgttcaacctggatatgtacggtcacggcgcaaatatgcacttcggctctcagacgaacccatcgctctggagcggcaccatcatcgccaagggcggcgatggaggagccggcattggcggcggcagaaacggcagcggcgagaagctgtatttctactcaggtaaaatcgaggcgaagggcggcgaagcggcctccggcatcggcggcagcttcaagggccgcggccgcgatatctacatctacggcggcgatatttccgccaagggcggcgatggaggagccggtatcggcgggggctgctggaaatcgttgcaggacatggatggcgacaccgcagcctataatatcaacatttacggcggcaagatcaacgcccacggcggatacaacggcgcgggcatcggcggcggtcagtacgtcccggcgcgcgatatcaccatcaccggcggcgagatcacggcgcacggtacgcacggcgcggccatcggcggcggacgctggtgtcacggtcagaacatcaccgtgacggacgcgaagctgaagctgacgacaggatactctcgatacatctcggacgaggcggcagctatgggctacggcgatcgtgtatacttggaaaaggtatacgatatcgacgtagggaaaagatatataggagatcttgtcaggaaccccctgcccgaagactacaagtccatcaaaataggctcataccatggaaagctggtgaagctgaaggttgaggcgcaagccatcaaccgcgacgacgagttcgccctcttctggaatctctatgatattctgattcccaatgaaaacgggcgtatcgacgtgcagctgctgacgctgccgtacgtgaagaactacggctgggcgatcgaagcgatggagatggagctgatcgacgacccctgcaacgggaagcacgacttcggctgggtcgaccggcagtcgtgccacgtctgggcatgccggaatatgaaatgtcaggcgcgtgacccggtggctgagatgtccaagcaaaacggaaagcacatccccggcgaatggggcaatcagaagcagctctgcactgtgtgcggccatgtgatgggaacggacacgaaggcgccggtgctggaggttttgaagaacggcgagagctacaccgtcgaggataccctcgatggaaatcccggcgcgtacaccttcaccgtgagcgacccggcgctgaatggtgagacgtcctccggcatcaagtcggtgaccatcaacggcgagccgcaagccggccccacctatcgtctccccgcgccggatggcggcaacaatgatgcgggagcggaatataccgtggttgcgactgacaacgcgggaaacgagactacggccacagtcagaacctacaggcggcaccatgtgaaggtcatcagcccggacggcaaaaagacctacgccgatttgatgctgccgcacaatgaatatctggtgctccagatcaggctgccggcgggcgtgtcggcaacgctgaccgatgaggcagacgggacgaaaatcccatatgacaaggaaaagggagagttccgggcgggtctgatcaccaaaaaccggacgctcgtgctgaactattcgacgaagcatccaaaggtcgagcttcgcttggggacgggtcagtacttcacgggatataacgcggattcggacgaaccgtattatctcaaaggcgcgtccatggatgagaattcctatcagataggcatgtgggtcgacacggacgcgaagccaggctattacctcagctctccggagcgctacacgcaggaagagctggcagcgcttgacgagtccctctggaaggaatacaagatagcggaagccacgccgggatcgatcgtgctgccatttatcttaatcacaatagacgctgcggcgtatgaagaaaacggcggttggtatgtctacgccaaagccacgaacccgacgggaacgacctat

SEQ ID NO: 483 - DNA, 819 bp, Unknown
  BMI gene
  misc_feature: SEQ ID N?1184191
gcgtacaaggcagctttcgggaacacggcgggctattacgacggcgttccgttcgaggaagctacccagttgcgctttgattacaacaacgcatggcaggtcaagggactttccaagggcggcaacaaggacgaaacctatcctttatattttgaagagggcgtgacctacaccctgcattttgaggtggcactcggctctatgagcgaattggttcgtcagatcgaaaccattctgaacgcgctgaacgatgaccccctcagcatcatcaaactgaccggttcctctcccgacgactaccgcgactacagtttcacccgtctgcttccgaacaccatgttggatatgctcgagcagtctgtggcgctcggaaacgtttccgacttcttaaagaaggacacagtcggcgttgcttcctcttacaccggtatctgcgacaagttgcagacgttgcttgagaagatggggcgcgacgagaacgcaatcgcgaagaaccttgataacttcaagtcctacgtcggttcattcggtacgtacctgaccgactccaagacgcagccgctgcagatcgactacttccgccttcagggcgcttcggtgaagaagccgaaggcgaaagcaaacttcttccgcgcaatcggacatgaagtttccagctttgtgatgcgcttcttccgcgattacaacagcatgggctcgatggatacgggagagacgaccaaagagtctatcaacgtctggttggcttacggtcgtgaccagtcgcaggttatccgaaacctctgcaccaacaagtttaccgcaagcggcgaatacggc

SEQ ID NO: 484 - DNA, 1029 bp, Clostridium
  misc_feature: SEQ ID N?1184764
gtgagcctgctgccggtctcggcactggcagtggagccgtctgacaccgcggcggcgcaggagacaacggtcattaccacggcggaggaatttgccgccatgaagtcggatggcgcgtaccgtctcggcgcggacatcgcggtggacgtgccctatgacaagacgtttactggtagtcttgacggcgcataccactcggtgacgctggcactccatgtcacggcggaggatacggctgcgtcgtgggggttgttccgcgccctgaacggcgcggcgatccgggacctgcggcttgccggcgagctggccaccgcagaggacagccccgcgcagagcgtgggcgcactggctggcacggtattcggtgataccatagtgagtggttgccacagtgaggtgcagatcagcgtctccacttctgacagccatgtaggcggccttgtgggcagcgtcaccggcggtacgctgaccctgacgggctgcgcgaacgcgggtacggtaaaggcactgaacagcgccgccgcgggcggtctggtgggcagcgttctgtccggcagtgtcacgatccagcggagctatcagtacggcgacgtgctgggcggcgtgtgcgctgggggcctgatgggccagctggcggagcaggcggaatgtacggcgtcgtacagctatgccgccgtgtcagccgatgacaaggagaatgctgacgcctccgccctgacgggctggggcgaggtaaagaccgtcagcggcgaaaaggccggtgcactgtgcggcgaaggtacgttcagcgtggagagcaaagcgctgttctggtcgggcaaggcgttcgggacggacgccgtccctgccggtggccagttcgaggagatggatataaatactgtgctggcagccttgaacgacggcacggcggcggatgatcccaacggctttttcctgacgacggagaacggcggctggccgttgctgcgctgggagctgactcagccgcaggcaccggatatggaactggacagcaagaaggagacg

SEQ ID NO: 485 - DNA, 210 bp, Unknown
  BMI gene
  misc_feature: SEQ ID N?1184821
atgagcgctaaaatggagcttctgaaaaagatcgccaaggagaacggggtaactatcgaccagatggctgccagtgcaggcataagcacagcgacactgtatcgtaaaatcaaggccggaggcggcacattcactgtcgagcagacagagaagattgccgcctgcaccaagatgacgcgagatcaggctgtcgctgttttttttaactga

SEQ ID NO: 486 - DNA, 420 bp, Unknown
  BMI gene
  misc_feature: SEQ ID N?1184822
atgaacgatggcagcgaaatggtcacgaccgaaaccccgaaagagaagttccacatgtctttctgggatgttctgacactctttctccttctttctggtgccgtgggtggtggtatgagcatcacgcgtgtacttgagcactttggtgttaattctgacgtttgcaatctagtcgccggcctttactggattctgtactgtgtacttgtcatttcccgcgtccgaaccaagtctgatgtgcagcgcaccagagatgccgcttacaacgaaggctttctggctggacgcgatcacgaatccccaatctcctacgcagccggtgaacagcgtggctatgaccgaggttatcacaacggcctgctggatggccgtgccgacggctgggattccggctatgaagccgcacaaaaggagcattaa

SEQ ID NO: 487 - DNA, 369 bp, Unknown
  BMI gene
  misc_feature: SEQ ID N?1187141
atggttagtaagaagtcaagaacagtagttcgtgaaaataaacatagaagattacgtaatcgttttgctggtacagcagaaagaccacgtttagctgtattcagaagtaataatcatatgtatgctcaaattattgacgatacagttggtaataccttagtttcagcatctactcttgaaaaagatgttaaggctgaattagaaaagactaatgacgttgctgcagcagcatatgtaggtaaagtaatcgctgaaaaggcaaaagctaaaggaatcaacactgttgtatttgacagaggaggattcatctatcagggtaaggtaaaagctttagcagatgcagcaagagaagcaggtctagagttctaa

SEQ ID NO: 488 - DNA, 1941 bp, Unknown
  BMI gene
  misc_feature: SEQ ID N?1189828
atgaatgtagcggaagttgtaaaaaaatactttggatatgatagcttgaggcaggggcagcaggaattagtggatggcattttagctggagaggatgtgcttggcattatgcctacaggggcaggaaagtccttgtgttatcaagcatctgcactattgctacaaggcattaccttggttatatcgccattgatttctcttatgtctgatcaggtaaaagcactaaatcaggcgggagtgcatgcggcatatattaatagctctcttacggaacggcagattgaaaaagcgctttctttggctgcaatggggcagtataagattatctatgtggcgccagaacgcttgaatacaccgcgttttcttgatttcgccatgggagcggagatttctatgttgacggtggatgaagcccattgtatttctcagtggggacaggatttcagaccaagttatcgggaaatcataaattttttgcgtatgttaccaaagagaccaattgtcagtgcgtttacagccaccgctaccgaacaggtaaagcaggatatttgtactattttgcaactgcgtcaaccaaaggtaatcgtgactggatttgaccgacctaatctgtattttcgtgttctcccaagaaagggaggaaaagagacagacaacgcaatcctcaattatatcaaccatcatgaggcagaaagtggaattgtgtactgtgccactagaaaaaatgtggataaagtctatgaaattttgaaagcccatggtgtatccgttggaaaatatcatgcggggatgtctattgaagaacggagaagtagtcaggaggattttacctttgaccgtgtatctgtgatggtagctaccaatgcatttggaatgggaattgacaagtcaaatgtccgttatgtactgcattacaatatgccgcagagtgtggaatattattatcaggaagcagggcgagcgggcagagatggagaggaagcggaatgcattttatttttctccaagcaggacattatgattaacaaacgcctgttagacttgaaatccgtagatgcctatggaaatgcaattgcaccagaggtgcgaagaaatgaccagagaaagctaaatcaaatgatagagtattgcgagacggaccaatgtttaagggagtatatgctccgatcttttggagacgccagcccctgtacttgcggtaaatgtagcaattgtgtggtggatgaccaactatatgatgaagaagtgttgtccgtgccaaagaagaagtctgctgcaaaggtattggaaatgacgggattatccgagcagggaatggtactatttgaattgttgagagcagaacgggcagaacttgccacagagcagggggtaccaccatttattatttgttcggataagacattaaaagatatgtgtatgaaattgccaaaagaaatgtcggatatgcttggtatctatggattaggtgagcaaaaagtggctagatacggagaaagatttttgtatgtgttgcagaaatttatggataatgctgttgtagacgtgacatctatgcaacaggaaaaacacagtgtgcaaagacagcagaaacagccattttacatagaaacggaacaactaaagcaattggagttacaggaggatgccagagtatcggatttggcaaaacagattaatgcattatgtgaggagaaagaccgcaaaaaattgacggcaagatttttaaatgaattgttggtaaatgcaggttatttgtttgaggaggaagtagagggcaaaaaacaaaagagggtgtcagaacttggcatacaagtcggaataaaagaagaattacgacggggcagaatgggagaatattattcgattagccattccaaagaaagtcaaatggtgatactttccttgttgcaggaatatttgaaagagcaggaagcgtaa

SEQ ID NO: 489 - DNA, 243 bp, Unknown
  BMI gene
  misc_feature: SEQ ID N?1190815
ttgaatattgcaaaagaagaaggctccagatttgcagagaggtgtcaaagtcatcaacaaacgaagttccttgacggctctacagagatcaaagtcggaaagcttaaaagtgctaccggcaaacgggatattcctctcaataataccgcagttaagatgattgaggaactccgtgaaaagtattacttcggtaaaaacacgcctctcatctgtgatgaatacggcagctataccaagcccagc

SEQ ID NO: 490 - DNA, 357 bp, Clostridium bolteae
  misc_feature: SEQ ID N?1196411
atgaacaagtatgcagaacgtttatataacggtattgtgaaagaaaatccaacatttgtgttgatgcttggaatgtgtccgactttggcagtaacctcatcggcggtcaatggctgtggaatggggctgacaacaacggtagtattggcagcatccaatatggtaatatcagccctaagaaaggttattccagataaagttcgtattcctgcatttattgtaattgtagcatcgttggttacaattgtgcagcagttattacatgcgtatgtacctagcttatatgacgcattgggaatttatattcctttgattgttgtaaactgtatcattcttggacgtgcagaagcttatgca

SEQ ID NO: 491 - DNA, 780 bp, Eubacterium siraeum
  misc_feature: SEQ ID N?1233375
atgtcagatataatcgtacctcagagcgatgtcaagctctgtacaagaaatgtaaatctctattacggcgaaaaccatgcgctgaaggatataaaccttgatataaagacaaacaagataaccgccttcatcggtccttcgggctgcggtaagtctacatatcttaaaagccttaaccgtatgaatgaccttgtgcctgactgtaagatcacaggtcagttcctgcttgacggtgaggatatctatgcggacggcgttgatacaaacgtactgcgccgcaggataggaatggtgttccagaagccaaatcctttcccgatgagcatttacgataatatagcatacggcccgagagtacacggcataaagagcaaggcaaagcttgacaggatagttgaggagagccttatcggtgcggctgtttttgacgaggtaaaggacagactgcataagtccgctctcagcctttcgggcggtcagcagcagagaatatgcatagcaagagcgatcgcgggtgagccggcaatactcctgatggacgaaccgacatctgcgcttgaccccgtatctacattgaaaatcgaagagcttatgaacacgctgaaggaaaagtacaccgttgctatcgtaactcacaatatgcagcaggcaaccagaatttcggactacaccgcatttttccttgtaggcgaaatggttgagtatgcacctaccgaagagttgttctcacgaccccgagataagcgtacagaggattatatcacgggacgtttcggttga

SEQ ID NO: 492 - DNA, 1902 bp, Eubacterium siraeum
  misc_feature: SEQ ID N?1235445
atgataacacagaaaaacataaaagtcaccggatataagtcagatggttttatcggaaaatatcagaaattgataagagatacggtaattccttatcagtacagcgtactgtgcgacaaggcgcccgatacggagaagagccacgttgtaaagaactttgagaatgcggcaaaggcgctccgcggagaggatgtcggtgacggcttttacggaatggtatttcaggacagcgatgcagccaagtggatagaagcggcggcttattcgctggcactttaccccgacgaaaagctctccgaaacggtagatgagcttattgacaaaatagccgccgcacaggatgaggacggctatcttgatacatattttacgataaaggacagagataagcgctggaagaacctgctggaggggcacgagctttactgctcgggtcatatgatggaggcggcttgcgcttactatgaagctaccggcaagaaaaagctccttgatgttatggaaaagaatgcggagcatatctataagcattttatcactgaaaaaaatgagggcgcacccggtcatcccgaggtagagcttgcacttatgaaaatgtatcgcacaaccggtaacaagaaatggctgcagttagcagagcactttataaacgaacgcggagaagatcctcatttctatgagaaggaagcggcaaagcgtgactggactgtatggggaaacgatccgacggcacatgactatcagcagagcggcaagcctgtaagagcgcagagcgatgctacaggacacgctgtaagagcggtatatctgtacacgggtatggctcagctttccgcaaagagcggtgacaatgcgctttatgacgcttgcaagcgactctgggagagcatcacacgcagaagaatgtatgttacaggcggtattggttctactgttttaggtgaggcgttcagcgttgactatgatctgccgcccgatactgcttatgcggaaacctgcgcttctataggacttatgttctttgcaaacgcgatgcttaaaaacgagcttataggcgaatatgcggacgttatggaaaccgctttctataatacggttcttggtggaatgcagcttgacggcaagcgcttcttctatgtaaatccgctggaggtagtacccggtatttcgggagtatcgcccactcatcgtcatgacttacctgtaagacccaagtggtacgcttgtgcttgttgcccgcctaacgcagcaaggcttattacatcgttcggttgctatgcttacggagaaaacagcgatatgagcttctgccatatgtatgcagacggtgagataaagtttgaaaacggtatggagcttgtctgcaggacaaattatccttatgatatgactgtaaattattcggttataaagggcggcagacttgcaataagaatacccggctggagcgatacattcacacttgcgcttaacggcgaaaagcaggagcttaaacctataaacggctatgttattattgcggtaaaggacggagatgaggcaaagcttgtgctttccgatacgccccactttgtatatccgtctgttaagatccctgctgtaagcggtatggcggcaataagaagaggtccgcttgtatattgcttcgaggatgcggataacggcgatgtgctgtcactggcacttaagcgcggcggcaagataacggtatgcgagcctgatcaaaatgagctcagcggtgttacaaagcttaaggtcgaggcggtaagatttgacgacaacggcaagccgtacagctttgatgagccgaaaacgaccgatactcttgcgatcgctgttccttattacacatggggtaacagaggagagaacgcaatgagagtgtttatgccgctttattaa

SEQ ID NO: 493 - DNA, 564 bp, Faecalibacterium prausnitzii
  misc_feature: SEQ ID N?1235565
gtggccctgctgctgacgccctcgcggatgctggcctgcctgctcagccgtctgtgccccctgcgggacgagcgcccggcccccgaagagctggaaaagaaactgctgccccgcgcctttgtctacagcggcagcgccgccgtggtgtatctggcggtgtatcctatcttgaacgcactcttcggcaccgatttgctggtgctgggcatctacctgcctctgctggtggtggagccgctgttgacctaccgcttcggccgtgtgcaggaaacgatgcacaaggctgtttccaaaggtctgcgcatcacgctgggctatgcgctgatcctgctgctgttgggctgtgtgcgcgagtggctggccctcggcagcgtgttcggcatcccgctcagccgctccgtcctgcccatggccgggatgccggcgggcggcttcatcgtgctgggcgtggtgtgcgccatctggcgcgcactggcccgcaagcggcagaaatacctgaaaaatgaggcgcgcggctatttggccgtgcatccgcaggagaaccggaaggaggcagaacaatga

SEQ ID NO: 494 - DNA, 1620 bp, Eubacterium siraeum
  misc_feature: SEQ ID N?1235844
atgatagacggcaacagaagatatgtaaagcgcagcggagcaaggcttggcgttctggacaacggcgagctgttccagcttactgtttttgacaaggatatggcggctcccgactggataaaaggcgggataatgtatcagatattccccgacagattttgccgcagcggtgaaaaacacgaaaacgttccgactgacagaataatccacgagaactgggaggatacgcctttcttccgcccggacgacaaaggcattatccgcaacaacgactactttgcaggcgaccttaagggtatcgaaagcaaactcccctatctcaaaagcttaggtgttacctgcttatatttaaatccgatctttgagtcgcacgaaaatcaccgctactcgaccgcctgctatgagcacatcgatccgatgctcggcagcgatgaggactttgagcacctttgcaaggaagcaaaaacatacggcattgatattatccttgacggtgtattctcgcatacaggtgcagacagtatctatttcaacaagttcggcaggtacggcgagcatgagggtgcatataaaaatcccgacagtcgctacagaaactggtactgcttctcgcgctatcccattgagtacgaatcatggtggggcatcactactctgcctaacgtaaacgagaacaaccctgactacaccgcatatatctgcggtgaaaacggcatattacaacgctggatagacaaaggcgcaaggggttggcgacttgatgttgccgatgagctccccgatgagttcttagacaatctcaataaagcagtcaaagccaagggcgatgataaggtcatctacggcgaggtgtgggaagacgcttcaaacaaggagagctatggtgtccgcagacgttatcttatcggcggtcagcttgacagcgttatgaactatcctttcaaagaggttattataaactattgcaagtacggtgactcaaagggctttgaggacggcataatgactatacttgagcattaccctaagcccagtgccgatatgctgatgaacttcctgtcgacccacgacaccgagcgtatactgacaagacttgcaggcgaggatgtaggctggcacgacagagaatggcaggctgagcgctatctttctccggagcagtatgtatacggtctgtcacttcttaagtgcgctatggtactgcaattcttcctgccgggcgtaccgtgtatctattacggcgatgaagccggtcttgagggatataaggacccgttcaacagacgctgttatccgtggggcaaagaaaatctggatatgatagatttcacaaagcagctcgcgcagataagaaattcaagcaaggcatttgcacagggcgaaatgaagtttctcgtctgtacgcctgaggagtgcgtatttgcaagaattgacaagctcaaccgtgaagccgccgttatattcttaaataagtcgaaatatcccagaacgttcaaccttgacgactatatgaaggacgaatacactaatcctcgtttcctgcgaaagcctcatgagagcgatgaaaagacgatcaagctttcaccgtttgattacggtgtgcttgtatgcagtatataa

SEQ ID NO: 495 - DNA, 1548 bp, Unknown
  BMI gene
  misc_feature: SEQ ID N?1236828
atttttgcatcaaacattggttcggaacacttgatcggactggctggtgccggagcatccagtggtatggctatggcacactgggaaatccagggatggatgattcttattttgggatgggtattcgtaccgttctattcaagaagtatggtatatacgatgccggaattcctggaacgtcgttataacccgcagtcccgtactatattgtctgtaatttccttgatcagttatgtactgactaaggtagcggttacggtatatgccggtggtctggtattccaacaagtattcggcattgaagaactctggggaatcgatttcttctggattgcagctatcggtctggttttgatcactgcattatatacgatcttcggtggtatgaagtcagtactttatacttctgtattgcagacaccgattttattgctaggttcactgattatccttgtactcggtttcagagaactgggtggatgggacgaaatgatgagaatttgtggtgcggtaactgttaatgatcagggcaacaccatgacggaattaattcgtagcaatagtgacccgaacttcccttggttgggagcattaatcggatcagctatcatcggtttctggtactggtgtactgaccagttcatcgtacaacgcgttctttcaggtaagaaccagaaagaagcacgccgcggtactatcttcggagcttatctgaaattgttacccgtattcttgttcttgattccgggtatgattgcttttgcacttcatcagaaatacctcggtgcaggtggtgaaggtttcttgccgatgctggctaatggcagcgccaatgccgatgcagctttcccgacactggtagccaagttgttgccggctggtgtgaaaggtctggtggtttgcggtatccttgcagctttgatgagttcgttggcatctttgttcaactcatctgccatgctgtttacaattgacttctacaaacgcttcaaaccgaaaacttctgaaaagaaactggtagttatcggtcagatggcaactgtagtgattgtaattctgggtattttgtggatacctatcatgcgtagcgtaggtgatgtactttatacttacttgcaagacgtacagtctgtattggcaccgggtatcgccgcagccttcctgttgggtatctgctggaagcgtacttctgcccaaggtggtatgtggggattgattgccggtatggtaatcggcctgacacgtctgggagcaaaagtatattacagtaatgcaggagatgtagccggtggtacattcaaatatctattctatgatatgaactggttattcttctgcggatggatgttcctgttctgtatcattgtagtgatagtagtcagtctggcaacgaaagcaccgtctgaagaaaagatacaaggattggtattcggtacctctaccccggcacaattggcagagacacgtgccagctggaatcattgggatattatccatacgattattatcctgggtatcactgccgctttctatatctatttctggtaa

SEQ ID NO: 496 - DNA, 1533 bp, Eubacterium siraeum
  misc_feature: SEQ ID N?1237309
atgataaatttcgccgcgggtaatacttgcggcgatagctttagaggacctatggaatattacatctatttgctgcaaatattcggcggcggaaacccgaagatacatgaggtaataagagcatgcggaaatgcgcgcaaggcgtatgagcgtataagcggcggagatatgtcgcttattccgtctaacaggcaggatgctgcacgcaaagcaacacttgaacgatcaaaggctattatcgactattgcaaagaaaataatatcgggatagtgacgcttgatgatgtgatatatcccgataatctgaaaaatatattcgatccgcctgtagtgctgtttgtatccggcaatatcggctgttttgacaataagcttgctgtagcggtagtaggtccgagagagccgtccgcagcggctgtgagaatggcggagaatatctgttataatcttgcgagatgtgatattgtacttgtaagcggttttgcaaagggaatagacaggatcgcgcataataacagtatccgtcacggaaaaccgacagttgccgtacttgcctgcgggataaccgttgattatccgaaaggctcgttcgggctcagaaaagagataaccgataacggcggtgcggtaatatccgagcttctgccggatactccgtgcaattcagactattttaagttcagaaaccgcataatatccgggctttcacacgggactgcagttgtaggctcgtataatcaaagcggtagtctgctaactgcaaatcacgcttttgaacaggatcgagagctgtttttcacagttccggaggatacgctcgacaggcgttacagtcgggtcataagatatttgcgtgacggtgctcaccctgtgtttgatttttacgacataataaacgagttttatccgacttacagcaatgtgatagacgatacatatcttgacaaggcacagctgacaagctttgtgatacatatggaaaaagatgaatgcgtacccgaaacgaaaatcgtggcggttgaaaaagatacggaaacggcatctgcaccaatggtgaaaaatgagaatatacttttgaagaaagtgaaagcggctgatgcgccgcgttttaagatcacaagtatcgccgacaaagaaaaagaaatagattatttccgcgtgacacccgaaaatgtgcttaaaaagcgcagaaaaacaacaaagcaaacaacagagatcaagcctgttgccgaaataaaaggcgcagaggtacagccgttgaaatcggcagatccggcggatatgtcagctccgataattgccgatgatgtcaaagcggagcagaacggcggtacagcggcaaatcccgaaaatgcgagtgccgccgcagaaatactcggaattatcgtaaaaagcgacgggataacgcttgacggcattatggcggtgagtgatttatctttcggggagctcagcgagatacttgccgaccttgagataagcggcgctgtagcctgcggtgcaggcggtatatacacggtaaagaaggcgtga

SEQ ID NO: 497 - DNA, 3147 bp, Eubacterium siraeum
  misc_feature: SEQ ID N?1237851
atgacggcaacggttaaaagcaggtatatgacgatttttaaacagatcacggcgtttatatgcggattgctttgtacggttgccgtttgctgttttttcggaacaaacgccgatgcggcggctgtatcgtcatgtacggtttcgaggatcacggcaaagacttatacaggaagtgcggtaaagcagaacccgacagtaaagtataagaacaaggtgctcagaaacggcatcgactacaccgtaagttatcaaaataataaaaatgcgggaacggcgtatgttataatcaagggcaagggaagttacagcggaacgattaaaaaatcgttcaaaatccagcctgcggtcatatataacaggtgttcgttctataaggtagcaacgcagtactataccggatcacagctgaaaccggtaccgcttatcaagaacggctcgacagttctgaaaaacggggtcgattttactctgacatatgaaaaaaatgtcaacaaaggaacggcaacggtaaatatcaagggtaagggcaactataaaggcagctgctatctgaatttcaagatagtcgcaagaccggtttctatgctgaatataagcgtcccggcggtgacttacacaggaaaggcattgaggcctgccgttaccgtaaaatacggcaacaagacatataagaacggaacggactatacgcttacatacaagaataacactaaagtcggaacggcgacagtagttgttacaggcaaaggaaagcttctgaccgggtcaaagagagttacgtttaagataaaccccaaaccgatatcgaaagcaacgatcgcatataagacttctctgacatataacggtacagcgctgagtcccgcagttacagtgaagtacggaaaagcaacgcttaagaagaatacggactacactgtatcgtattcaaataacaaaaatgcgggaacggctacaataaccgtcaaaggcaaaggtatctacggcggaagcgtaaaaaagactttcaggataacaagaaaagcgatacctgcctcggctgtttcaaatataagtgcaaaaagctttaccggggcggcgataaagccggtgcctgttgtaaagatcggatcaaaaacgcttaaaaacggaacggattttacattgagctataagaataataccgcacttggcacggcaacggttgtgcttaccggcaagggcaattattcgggcactgtaacaaaaagatttaaaattaccgcaagagctgtaagcggcgtaaaaataacagctgcgggagcaagctacaccggggcacaggtgaagcctgcggtgacggtaagctacggcacttataagtttaaaaacggtacggactataccctttcctataaaaataacacggaggtcggcacggcaagtgttaccgtaacgggcaaaaatcatctgagcggcagcaaaaccgtgacattcaagatatcaaaggctgatatcagaaaagcaaatacagttatcgggaatgcgatatttacaggacaggaagtaaagccggcattgacggtaaaaacaggcagactgcggcttatagaaggaactgattatactgtttcgtatctgaacaatataaatgcgggtaacgcaaagctgacgctgacgggtaagggaaagttcgagggcgctataactaaggcgttcatcatttccaaagccgacattgctgatgctcagcttaatgtgaaaggtgtatattcgcctgcaggtacaatatttactgtcagcggaaagtacggcgagtatgagcttaagacgggtgacagcgaagtaactgataccgacctgctccccggtgaacataaggtcgctgtaaacggtgcaggtgactttacaggcagtgttacaaccgactgcgtggtcgaaaaggctgacatatctgcggcaaaggcaacgttatcgctttcaacgagcggcaagggctatacggtaaccgtaaaatatgacggtatactgcttgcgcaggatacagattataaggtcgatatcgatgagtcggcgggcaatgtttcggcagtagtgacaggcgcaggcaattataacggaacactgaaaataaccgagatcagcggtgcgcttgaattgtttgaaaatgcaacggtaagtgtagatgatgtaacatacagcggcggtgctcagctccccgcaactactgtaacgataggttcttccgcactcaaagcgggaacggactatgtcctcagtgcgtacaacaatataaatgccggaacggcaaccgcagtgataacaggcataggaagctttgagggtgcagagatcaaggcttcgttcaaggtactgcctgccgctatatcttctgcaaggataacctgcgcagatcagcagtatacaagcaatacgcttactcctgttccgactgttacatataacggaaaaaagcttgctaaggacaccgactacactgtttcgggctataagaacaatgttaatgccggcactgcttcatttaccgttacaggtaaaggaaacttcgccggaacggtaacgggcaagttcagaatagttaaaaagaacagcatggaggcacttgtgcaaaagcgtcttgacgagatgatggaaggcaagtgggacaggaagataaacgacttttggcacagctatcagctcggcaaatattataataccctgctgacttcgccatgtacctgccacagcttctgtgaaacaggaaatgaaacgggctgtacctgtcttatcggaagaagtaatgtgctcggaaatcagggcatacagtgtgcgggatttacgatagaagtgtttgaatatctgttcggcaagacgaacggctataaagaaaatactcttacgataaagaaccgctcggacggaaactggacggaagcggcactgaaaaagtggatgacggatacgttccgtcccggcgactatctggcatatgataacataatgtacggatatccgcactatgtcacgatatactctgtcgatacggacggtatatgggtatatgaggcaaactacggcggcagatgtaagataaacttccgcaagttcacgttcaaggagatatacgagcagacagacgggctctggcacagaacgccggataattatgagctgtcggagtattga

SEQ ID NO: 498 - DNA, 495 bp, Eubacterium siraeum
  misc_feature: SEQ ID N?1237977
atgaaaaacataatacttatcggaatgcccggcgcaggcaaaagcaccgtaggtgtactgcttgcaaaatcaatgggctacgactttgtggacgcagaccttgttatccagaaacagcagggagcgaagctccaggacataatcgatgagcgcggacttgatggatttaagcaggcggaggaacaggcactgctgtcaataaacgataaaaaggcaataatcgcaactggcgggccagccgtattttcagccgcaggcatggcacatctcaaagaaaacggcatctgcgtatatctcagagtggacgagcaggagcttatccgccgacttacgaacataaaaacgcgcggcattgcctgccgtccgggtgaaacggtagcagagataatcgcagagcgtgaggcttactacaaccgttatgcagatattaccattgactgtgtgggtacgacagccgagcaggtggtagagatgataatggagaagacaagatga

SEQ ID NO: 499 - DNA, 1203 bp, Eubacterium siraeum
  misc_feature: SEQ ID N?1238964
atgaacatagctattgctcagtcgggcggacctacggcggcgataaactcttcgctctgcggagtgtttgacgaagcggaaaagtataacgagatcgacagaatatacggctcgctgaatggtatagagggcatactgaacgataaccttatcgaccttaaggaagtgcttatcacagaaaacgacaagcagcttctcaagcgcacaccgtcaaccgtgcttggttcatgccgtttcaagctgaaaaacagcagtgatgacgacagcgactacaagcgcataacagaagtgttcaaaaagtacggtataaccgcatttttctatatcggcggtaacgactctatggataccgtaatgaagcttgacgcttatttcagagaaaaccacattgatgtaaaggttgtcggcgtgccgaaaacgatagacaacgacttaccgctcaccgaccatacaccgggctttggctcggcggcaaaatacgttgcgacttctttgcaggaaataatccgtgacagccgcgtatactcaattccgtccgtcacgatagttgagataatgggacgcgacgcaggctggctcaccgcatcgtcctgcgtactgcgtgcaaacggcgagccggcaccgcaccttatatatcttcccgagagcgatttctcggaagagggctatcttgaagatgttaaaaactcgtcaaagagatacaaggcggtcatagtggcggtgtcggagggaatagactgccttgcaggtcggtcggagcttacagacgcattcggtcacaaatacctgtcgggtgtcggcaagtatcttgaggagcttacacgcagtaatatgggctgtaaggtgcgttcgatcgagcttaacgtaatgcagaggtgcgggtcgcatatagcgtcgctcaccgaccttgacgaggcgtggagaataggcgcggcggctgtgaacgaagcgctcaaatacggcgggagcggcgtaatgatgggctttaagcgtatcagcaacaacccttaccgcgtgggtatcactccgcttgacgtaagggaatgtgcgaacaaggcgaagtatttcccgaaagagtggataaccccagagggaaacaatgttactatagatgcgctcaactacttcctgccgctgatacagggcgaaccgaagatagattttttgaacggcatacctgtacatttcagacttgaccagtga

SEQ ID NO: 500 - DNA, 786 bp, Eubacterium siraeum
  misc_feature: SEQ ID N?1239044
atggcaatgataatgggtgttatactattcttgccttttgttctcatagacggcggatatttcatctattacggggattataacgctcagcagatacctttctacacactttgcaaccaagctataaaaagcggcagctttatgtggaactggcaaacagacctcggtgcgaactttatcggctcgtactcattctacacactcggcagcccgttcttctggctcagtatgccgttccccgcagaatttgcaaagtaccttatggcgccgctcatggtgttgaagctgtcatgctgttcgctgtttgcttttgcttatataaggcgttttgtaaaaaagccgaagtccgcgcttatcggcggtcttttatatgcattttccggtttttcgatgtacaatgtattcttcaatcacttccacgaagcgatggtcgtgttccctcttatgctgattgcgctcgaagaagccgttgtaaacaagagaagagtgttctttgcacttactgttgcgctcaacgcatttgtaaactatttctttttcatcggagaatgtatatttcttatcatctacttcctttgccgtcttaccgacccgaaattcaaggtaacattaaagacgttctttgcgctggcgtttgagtctgttatcggcgttgcgctggcgggagcgatgttcatacccgcgataataacctgtatagataccccgagatcgggcaataccttaaacggctggaatttggtgttccataatccgtcacagcgatatggaataatattgcagagt

SEQ ID NO: 501 - DNA, 1248 bp, Eubacterium siraeum
  misc_feature: SEQ ID N?1239386
atgctgcttggttcacttgtaataagcggttgcagtaacagcgaaacatcgggcacacagtcaggctctgatacaagcacggatgaggtgatcaccgcacatcagggtgagataaaggatataagctctacagagcttgtaaaggatatgaagataggctggagccttggtaatactcttgacggcggcggacagagctcaaaaggctcttctcccgaaacgatagagcgggcatggggcaatcctgttaccacaaaagaaatgatcgacgagatcaagaaagcaggcttcaatgttttgcgtgttccaacaacgtgggactggagcacaggcgaagctccggagtataagataagcgatgagtggctagccagagtaaaggaagtagttgactacggaatggcaaacgatatgtatgtcattctcaatatccatcacgaaacatggcactatcccacagaggataactacgaggcggcaagcgacaggcttaaaaaggtatggactcagataggaaactactttgaaaactatgacgagcaccttatatttgagggacttaacgaaccccgtgttatcggctctgacgaggaatgggtaggcggcagtgacgctacaagagaagttgtaaacaagctggacgctgactttgtatccactatccgcagtcttggcggcaacaacaagctccgtcaccttatgataccgagctatgccgcatcatcgagcgaggtcgcacttaaggcacttaaaatcccggaaaacgatgataagctgatagtttcggttcatgcttatataccgtacaattttgctcttgcagagtcaaagcaagcaaacaagtggatagcatgcaagggtggatttacaaccgacattgataatcttgccgatcttttgaaagctacatttattgataagggtcaggctgtcattatcggagagttcggtgcaagaagcaaggataatgaaaaataccgtgcggaatgggctaaatattacattacaaagatgaatacgatcggtgttccttgtgtatggtgggacaacggtgcattcaccggaaacggcgaactgttcggactgttcgacaggcgcaatctggaatggagatttccgcttgttaaagatgctcttatttcggcatctaacggcgaatacacggtagacggtcttaagtcggataaatctattcttgatgagctgaaaaatgacatggcagaatctaaaaacagcagtgacgaataa

SEQ ID NO: 502 - DNA, 606 bp, Faecalibacterium prausnitzii
  misc_feature: SEQ ID N?1239545
atggccgaaacgaataaactgctggaagagaccgcaaactatctgctcagccactgctttctgctgggcggtgtggaggaccagcggtcgaagtatctctatgtgcaggaccacctgaacgaggtgcgggccgtgttcgcgccgctgggctatgcggtcctgctctacccggccccgctgcaggcggcggcactcgtcaacgagcacgagggcagccaggcccggctgctgaaatacgagagcatcctgctgctggtgctgcgcctgctctacctgcaaaagcgggagagcctctcggccagtgcagaccaggttctggtcacggtggaagaagtgcaggccgaactgcaaaaaatgaacctgccccggcggctggaccagctcacgctggaaaagctgctgcgcaccctgcgccggtacaatctggcccggcccgtgggccgtctgaccgggctggacagccgcatcgaggtcttcccgaccgtgctgctggcgctgccggatgccgacctcgccgatgccgctgccgagagcagccgcactcggaacgagctggccctgtacgaacgcccggagggcgaatccagtgcggaggatgaagaatga

SEQ ID NO: 503 - DNA, 1194 bp, Eubacterium siraeum
  misc_feature: SEQ ID N?1239552
atgaaaatcagagtaggtgtatttttcggaggaaaaagcgttgagcatgaggtatccatcatatccgcacttcaggcttgcaattccataaacaaggataagtacgaggtgatacccgtatacattacaaaaaacaatgaaatgtatgtcggagaaaaaataggaaacatcgcatcgtataggaatttgaagtcgcttctcaaggaaagccacagggtgatacttataaatgacggcgggaaggtacagcttgtgctttatcccggaaagaagttcggcaacaacgtatatgcaacgatagatgttgcgttcccgatagtacacggtacgaacgttgaggatggcgtattccagggatatttacagacaatcggcgttccttatgtcggctgtgatgtaatatcatcggcagtcggtatggataagtatgttatgaaaaccgtattcaaggataacggcatacctgtccttgacggaacggtaatccatataagcgactacgcaaaggatgcggaagcagtaaaaaatgatataaaggcgaagatcgcgtatccgattatagtaaagccgataaatctcggctcaagcgtaggaattatgatagcgcacaatgacgaacagcttgatgaagcgcttgacaacgcattcacatacgcgtctaagcttcttgtcgagccggctataacaaacctcaaggaaatcaactgctcggtatgcggcgactatgctaccgctcatgcatcggaatgtgaagaaccggtaaacaccgatgaaatattaagctacaaggataagtatattgcgggcgataagggcggtaagtcaagcggtatggcaacgctgaaaagaaaaatccctgctgatatatccgatgaaacaagagagcagatacgcacccttgcggtaaaggcgttcaagtgccttggcgcatcgggcacatcgagaatcgactttatgatagatatggacaacggcaacctttttctgaacgaaataaacacaataccaggcagccttgcgttctatctgtgggagcctgtcggcgtgaaatatcctgagcttttagacgagatgatctcgctcgcattaaagcgtgaacgtgagaataaggcgctgacattcagctttgacaccaacattcttgacggttttacaggcggtaagctcggcggagctaagggcggaaagctgtaa

SEQ ID NO: 504 - DNA, 2355 bp, Eubacterium siraeum
  misc_feature: SEQ ID N?1240796
atggtaaaatacaagacaaacggaggaatgcatatgaccgaaaacgaatttatacagcgatacacttcacatctgagtgcacagcaaaagcaggcggttactgctaccgagggggctgtacttttgcttgccgtgcccggaagcggaaagacgaccgtgctgataacacggctaggctatatgatatactgccgcggcatagcaccgtcagagatacttgccgttacctataccagagccgcgacatttgagcttaagaagcgtttctctgcgtttttcgggagcgagtacgcaggaagccttgagatacgcacgataaacggcttgtcctcaaagatcatagaacggtacggaagtgtgcacggtgccgagagcattccgaagcttatgagccgtgagggcgaccgcaagcggctgatatcggatatatacaaggatatcaccggagaatttgccgatccgtccgctataaacgatgtcggcgcgatgatcacatatgcaaagaatatgatgctgacagacgagcagatatcggagcttgactgcggcgttgccgatacacttaagatttataaaaagtattgcagtgagcttgctgtcagagggcttatggattatgacgaccagatggtgacagcgctcgatatacttacaaagtgccccgatatactggattattatcacggacattttcactatatatgtgttgatgaagcacaggatacatcaaagatccaacacgagataataagagtgctcgcaaagggcagcggcaacatatttatggtcggtgatgaggatcagagtatatatgcgttcagaggggcttatcccgatgcgctgaccgactttgaaaagacctatgagaacgcctcggtgctgtttatggagcggaatttccgctcaacgcccgagataatcggtgcggcaaacgcgtttgtcagccgcaaccgcttccgccgtgacaagactatctgcgctgtgaacgaagcgggaatgccggtcagaacggtacattgccgcggcagagctacacagtatgacttcctgtgcggcatcgcaaaaagaaatgaaatgcagacagcggcactgttccgcaacaacgacagcgcggtggcgcttgtcgatatgctggaacgaagcggtataggctacagacttaagggcggcgaaaagacattctttacaagtaagcccgtaacggatatcgtatcgatcataaactttataaatgatccatataacgttgatgagtttatgcggatatactataaaatcggtctgtatataaacaagcaggcggcacagacagcctgccgtataagcgcggcaaggcatatacctataaccgatgcactgcttggtccgggtgaacccacggtcggcggcggaatagagctgacggaaagctcgcgtaagaatatcatgcgtatggcggaatatgccgctcaggcgcacagtgcgggagcatcggaaacactcagcatcatatggcgcacaatgcagtacagcgactatgttcccaagcataatcttgacggaggaaagtacgccgtactgcgcttactcgcaagaaatgtgagcaacggtgagcaattgacagcacgactcggtgagctgagtgagataatggcaacacatactgatgaccccgacagccttttcacgatgtcaacgatacattcaagcaagggccttgaatacgaccgtgtttatctgcttgatgtgatcgataatgtactgccgtcaattacatcggacaagcttgatgataaggaagatgtaaagcagtatgaggaagaacgcagactgttctatgtcgctatgacaagagccaaaaaggagctgtatcttttttcatgcacaggtgaaagctcggaatttgtaagcgaggtcgaccgcgatatcccgatcgagtacaccgacagcaatgacattttcttttcgatgtttgcaagggatatgctcgggcgcgaatactgcgaccgcgaaaacggcaagggcgtggttacggcttactgcaacgataagctgtatataaggtatgcaagcggaaagagcgagcttaagacacttgaagaaatgctgaaagaccgcgacaggaccgcacactatattactaaggaggagcttgacaagctgaacaccaatgacagcgcaaaagcagatatagtgccgtcaaagcggatagttatgccaaaagagggagataagctgtatcacggcgttttcggtaacggcgttatcagaagtatagacaagctcggcataggcacggtgtactttgaagcaagcgggcagacaaagcgccttatgcttgaaacgtgtgtgaaaaacgggatcattacggtgtag

SEQ ID NO: 505 - DNA, 717 bp, Eubacterium siraeum
  misc_feature: SEQ ID N?1241551
atggaagttgtaacacttgaaaaagagcttaactctcttgcttatcacggcagaggcatcgtgataggaaaatccgcagacggcaaaaaagctgtcatcgcctactttatcatgggcagaagcgaaaacagccgcaacagagtattcgttgaagacggcgagggtatcagaacacaggcttttgatgaaagcaagatggaagatccccacctcatcatctatgctcccgtaagagtgctcggcaacaagacgatagttacaaacggcgatcagaccgacactatctacgagcttatggacaagcagatgacatttgagcaggctctcagaacaagagaatttgaggacgataagcccaactacacaccgagaatttccggtatagttcaccttgataacggcgagatgaattacgcaatgtctatccttaagagtgcagacggcgacggctcatcatgtcagagatacacttttgcttacagcgatcctataaacggcaagggtaagttcatccacacctacaagggcgacggcaatcccctgccgagctacgaaggcgaacccaagacagttgttatcccggatatggatattgacgcattcacatcaatggtatgggaaaacctcaatgccgacaacaaggtttcactcttcacccgttacattgatattgccacaggcaagtacgaatcacgcatagtaaacaaaaacaagtaa

SEQ ID NO: 506 - DNA, 144 bp, Unknown
  BMI gene
  misc_feature: SEQ ID N?1243154
ttggccgaaagcggaaagttagatgcaatagcggtaataaattcaaggaagcgccgcgaatacgcttttccgctggcaacacagtcaaacgaaatccagctcaaatactacgagcagcacggcctgacactgagcgccccggag

SEQ ID NO: 507 - DNA, 516 bp, Faecalibacterium prausnitzii
  misc_feature: SEQ ID N?1243627
gcggcgcaagagcgccaaaacgatcccgcctcggagattgccttctacgagaagaagctggcagacaataagaagtctatcgcgaacgtgctgcgggctatcgagtcaggcgcggcgacgcagaccttgcctgcacgcttgcaagaacttgagaacgagcaagcggtcattctgggcgagctcagcttcctcaaaggcaagcacctcgcgtttacagaggaccagattctctttgcgctgatgaaacaccttgagccgtacccgggagagtccgagcaggactaccgccggagaatcatctctgactttgtttcagaggtctacctatatgacgaccgacttcttatctacttcaatatcagtagcgaagacggaaaactcaagtcagcggacctctcaaatatcgagggcggtgagttcgacgagggactcgtcagctccaccaaacaagaatcaggcgaaccccacaatctagttcgtgggcgcgttcttcgtcctgatcatgccgctccctga

SEQ ID NO: 508 - DNA, 1566 bp, Eubacterium siraeum
  misc_feature: SEQ ID N?1244765
atgaaactgtatcttaccgaccttgacggaactcttcttgaccataaagccgaaatcgggcgaatgacagaagctatgatgaatatgctgatcgacaacgacattgccgtaagctatgctacggctcgatccgttcattcggctgagccgaaggtaagctgtatcaattttaagcttcctgtgataacccacaacggagcttttatcattgatccgattacaaaagaacggcttgttactcacttttttgacaacaacaccaaagcgttcttgaaaagctatttttatgaacacaaagagtcaatactagtctattcggttattgataattacgagcgtgtcagctatcttgaagaaagactgaacaaaggaacggtgcgctatctcaaggacagagccggagataagcgtatgtaccgtgccggtgactatgaagagctttttgatggcgatatttactatataacgcttattgaaccgataacctcacccgaagagcttgacaactttttttacaacaagaacggattttccaggaactatcagcccgatacatacgatacaagcgaatactggtatgagatatatcgcgacgatgtatccaaagcaaacgccgcactcagattgaaagaaatgctcggtgcagacgagcttatagttttcggcgacaacacaaacgatatttcgatgttttcggtcgccgacaggtgttacgccgtatcaaatgccaccgacagactcaaagcgcttgcaacaggagttatccgctccaacgaacaaagcggagttccggcattcattcaaaatgataactgcacggtatggcaatataacaaacagccgttactcgttgcccccgacaacgcgcgtttcagtgcctgcaccgctacagcagacagcggcgacggagtcgggattttgaacgaaaagcagatacacgcaacacttaaaagctactttgcctcttccctgttcgacaaggaaataaagataggcaattactttgccgaccttgttaccgagaacggcatatttgagatacagacggcaaatttcaaataccttgtgccaaagctcaatacttttcttaaagcttctcacgtcacggtagtatacccatatcataaaaaaagccgtcttaattacattgacaaatccaccggtgaaattcttaaaagcggaagaacagtcaccgcaagcgatatgagcgatttctttattgagctttacagaataaaacagtatctcagcaatcccaacctcacgatctgcattgcagatattgcggtagaaaatctgagatactgtgctaaagatatgaaacgcaggaagtcggacagaaagattaccgttccgacctcactgctacagcttacttatcttgaggacagcgacagttacagatgctttatccccgaaggcttacccgaaacgtttacgctcaaagagtttaaaaagcgtatgcgttccggtgatgcctctattgcgataagaatattgctgtatgtcggcgtgatcgactatgccggtaagctcggcaacgaatatctctacaagatcacataa

SEQ ID NO: 509 - DNA, 834 bp, Eubacterium siraeum
  misc_feature: SEQ ID N?1247386
atgacagacagcatgataaaaaattgcgccgcattactcgatatactgagggagaagaaccctcttgtacactgcataactaactatgttaccgcaaacaccgttgcaaacggactgcttgcggcgggagcatctcccgttatggcggacagtccgcttgacgctgaggatataaccgcaaaggcgtcggctgtgcttttcaatatgggcacactcagcaaggacagactccgtgcaatgctgatttccgcacagaaggctgcggacacggcaaagcctatcgtgcttgaccctgtaggtgcaggctcaaccgacaacagactgcgcagcacaatgcagctgctccgtcagttcagatttgccgcaataagaggcaacgcgtccgaaatatccgcactgctttccacaagccccatcaccatgaaagccgaaaaaggcgtagacagcgccgaaacaacgcttgaggataagatcgcacttgccaaaaaggcggcaaagcgtttcagctgtaccgttatggtgacgggcagtaccgatgtcgttgcaggcggcgataaggtcgctcttgtatcaaacggaatacctatgatgagcaagatcaccggtacaggctgtcttgcttcggggcttgttgcggcgctgtgcggctgtaccggggacagctttgaggcggcggtaacggcggcggcgcttatcggcacagtaggcgagatagcaggcgaaaccgcaaagggtacaggctcgctgtatgtcggtatgcttgacacgctgacgaatattactcccgatattttcacacaatacgcaaagatagaaaattacacaggagaataa

SEQ ID NO: 510 - DNA, 105 bp, Unknown
  BMI gene
  misc_feature: SEQ ID N?1247391
acattccagcaggtgcaaagctgtactaaaaacgagatgtaccttattggtggaagttcaaaaattacaagggataataatgaagaacctcataaaggtgagtaa

SEQ ID NO: 511 - DNA, 1020 bp, Eubacterium siraeum
  misc_feature: SEQ ID N?1247646
ttcaaaatgaataataaaaaagtattagattttatcggcaagagaaaaattctctttgctataccgatagtaattgttgcaattacgatcattttcaactgcattttcggagtacagatggctatcgagttcaagggcggtacgatgctgacatacagccatatcggcgaaatcgatacaaacgctgtaaagaaggtggtcgagagtgagaactacggcgctgttaccgttactacgggttcttcgatgaacagctcgcttgagaccgttgagatatcattctcttcttcagagggtcttaccgcagacaaacagacagctttgtcgggtaagcttcaggaagccttcaaggacaatgatcttacgctggtaaacagccaggacgttaaccctacatccggtactgagttcttcttaaagtgccttgttgcggtactgttctcgtttattctgcttgttatttatattgcgttcagattcaagaagatcggcggtctttcagccggtgtgtttgctctggtcgcgcttgtgcatgactgcgttatggtttatgcggtgtttgtgttctgccgcttcccgatcgacgcaaacttcatggcggtcgttcttaccgtactcggtaactcgatcaacaatacgatcgttgtatacgaccgtatcagggaaaaccgtaacctatacggcaactcgctttcacttaaagaacttgttaatatgagtatcactcagtcgataacacgttctgtaaacacaaccgttacaactgctttcgcagtacttgcgatctgtgttgtatgcgctatatgcggtgttacctcgataatgacatttgctatacctatgatggcgggtcttatctgcggtacgtattcttcactgtgcatctcgggtcccttatgggtgctctggcaggaaaagcacggcaagaactatacaaattccggaaagagcgatgataagaaagatacaaaaaatcttgcttcaaacacagcgatagacgcaaagaagcttatggtgtaa

SEQ ID NO: 512 - DNA, 693 bp, Eubacterium siraeum
  misc_feature: SEQ ID N?1247895
atgatcgatcgcgaagaactgcttgtcgagcttgaaagcctctcggaagaaaagttccgtatattcaatgaaaaaatagtgcatacaagcaattataagatcataggtgtgcgtatgcccgaccttaaggcaatagcaaaaaagcacagggcggattacaagaaaatttttgaaatgccgtatgacagctttgaggagataatcataaaaggtgcggcactcggctttgcagacgtgcctctgtccgaaaaagcgccgtatgtgatacgctatgccgggatgatcgacaactgggcggagtgcgactgcttctgctcgtgcataaaggtcaaaaagagtgaagaggacgctttgcgtttgctttcggacaggctgatgaaaaggaaagaggagtttgtttcccgtgtaggcatagttcttatgttctcgaaatttaccgatgaaccgaccgtaaaaaaggcactggatatttatgatgcacttccttacggagcatattaccgtgatatggctgtggcgtggggcttatcggtatattgcgtgaaatacccggaacttatcaccggttatcttgaacacagtcctataagtataaaggtaaagcttatggcggcgcaaaagatacgcgacagcagaagagtaagcgatgattataagaaaaggataacgtgcattgtcaatgcacagagataa

SEQ ID NO: 513 - DNA, 264 bp, Unknown
  BMI gene
  misc_feature: SEQ ID N?1248773
ccggatgcggcagaagcggcggtggaggaggagcttgcagagttgcaggcagccagagcaccggccgtgacgccggacatggcagcagcggcagcgatcttcaaaaagcctttgcgcgagatcttgttcattgcggggttcctttcttcttttcttcgtgtgttcttcatttaccttccaatacttcttcggtctgtgcagcgtgtgcctgcgcagacttcgttcgataataatttaacacaaagttttgcccctgtcttttaa

SEQ ID NO: 514 - DNA, 1215 bp, Unknown
  BMI gene
  misc_feature: SEQ ID N?1248778
ttgagaaaaattgaaggtgttgcggaaccacgctttttatggtatgatagttaccggcaagggagtggtttcttggatacaaaattacattttatttataaaaacgaattgaatatggaaagttttattcacatgcttgacgacgcgaccgaatgttataagttttattggctcggcgcattgttgagcttgttttcgtacggaaaaacagaactttcttttgatgaattgcttgaccggatgatcgtggatgcatggtattcggtggtcgaatatcatctgcatctgggtccgaaaaatacacagggtgaagtgatgaacagtttagagcgggcggtacttcttttggaaaaaaattcgggtctttccagtaaggcatccgaagaagagattcttgccgcgattcgtgagcaggaagaccagttaataaaaaatgtgccataccgggcacttgctccctttatgccggagatcacaggaaatgacaaaatatggaattcaacagcgcgcgtgatcgaatatattcatggattaaatgttatcaagtgtcttccctatgaaattcaaaacggaaaaggacggcagaaaatggttcgcatcaatgaaaaatggcagccgttttttcgcgataattatgcgacgatccacggatggatcgaactgaaaaaagtgcgctatttacaggggagaaacccgggagttccgggtgttatttataaattggaaccagaaaatacaaagcttcgaaaacttcgttatgtgcgggaattatggacatcaattatggatctccgtccggtatatgacatttattcggaagagaaaatgtcagagaaaaactttgatatcgatcattttgtgccgtggtcttttgtcgctaatgatgagttatggaatctcatgccgatggagaagcggttgaattgcagcaagaacaataggctgccggcatgggataagtattttcaaggatttgcggacaatcaatttatgatgtttgaatgtgtgcaggaaaaagaaaaggtaaaggaaatatttggaaaatgctaccgcgacaatctggtgacgccgtggtccttggaacaattgtatataagcggatgcgaaaaagaaaaattctgccgtgtattggaacagaatctgcggcccatttctgcttcggcgaagatgcaggggtacagcatgtggacaatcagcaaggagacgatgagatga

SEQ ID NO: 515 - DNA, 819 bp, Eubacterium siraeum
  misc_feature: SEQ ID N?1249002
atgaaactcaataaagaatttatacttaaaaatcttatgggaattatctgtgttctgatagttcttgcgctgcttcttccgtttatgtcggtcaaggcggaggtatccgtcggcggatttggcggcggaagtgccgatcagtcagtgaacggcttttcacttgtaacagacggcgggattttcggctttgcatttatactttgtcttgcggcagtggcggcaagctgttatatcccgcagttaaagccgttcagaaagataatcgccgcagtcggctcggttgcaggaacgatctgtctgttcatagctccaggtgcggcggcaggcgctgtaaatgcggcggcaggcggagctgcggcaggtacgggagtttcggcaaaggtcgagcttagctatcagataggcttctggataatacttatacttatgcttgcacttatcgcgatgtccgttatacagttcttaggtcttaagggcaacaaggtctttgacgcggtaaattctgccgaagcagataccgccgcattgccgacaaatacaggcgcggaaactaaatcaccgctcgccggcttaaataccgacagcataagaaatatggcgcagaatgcggcaggcggaattgccggtgcggcagagagcctgaaggataaagcctcgcaggcggcacagaatattcagaaccgtgctcccgcggctaaaaaggaagatcctcaggctgtgatggagcagataaaacagctccatgagatgaaagaaaacggaatacttacagaagaagagtttgcagagaagaaaaaggagtttttagctcgcctctga

SEQ ID NO: 516 - DNA, 1491 bp, Unknown
  BMI gene
  misc_feature: SEQ ID N?1249004
atggaattattaaagcaaaatgagcttaccgcaaacaaggccgcggcaagcgtaatgagggtcacaggcatactgtttgtgctggttctgatacttgatattgtagggatattcaaggttcaggtgcccacaatggtggtcgcgtttataataggcgaggtgctgctgttcctgcctacactggtgacaaatatccttaagatccaaaagggctgggtaaaatactttaccgtagcctgtgccgtattgttcacaacagtgcttgcgtgtgtacttgcataccacgttgtgatcctttatgtatatcctatagctatagcgagcctgttcttctcgactaagctcagtatgttcacgatagtgtttacggtgctcggtacggcgggtgcgcagtatgtctgctttatctgcggatttgtcgaggatcataatgtagaaaacataactcagctcataacctatctgataatgcccagaaccatagtgcttattgccgtatcggcaataatctatgtgctttgcagacgtactgcgataatgctcggaagccttatgggtgctgaaaagcagaaggagatacagaaaaagacccttgagatatccggctcgatggcagatatggtaaacgagcttgaaaaggtatcctcagcgtctgccgaagccaacagcagcatatccggcgaaacgatgaacgttatgcgcgacagcgatacgaatgcggaatccataaaatcgatcgagcagaacataacagagatatccgagagtctgcgcagtctttcggagatgagcggcaaaatagcaggtcttacagaaaaggcgaacgagataaccgccgataatgacaataagataaccgccgcgtcgcagaacatggaaaagataagtgcgagtaccgatgatacctgcgatatgatactgagccttgcggcgcagtccaagaagatagcggctatatcaaatgttatttccgacatttcgacccagacaaatatacttgcgataaacgcgtcaattgaagccagtcacgcgggagaagccggctcgggctttgcggtagtcgcagacgagatcaaaaatctttccgaaaagacagccacggcggcagaagaaataggcgatatcatttctgcggtaacaaacggagtggaaaaagcggcagatgcaatgaagcacaacgcggcacttacaagagagggcgtttccgatatggaaactatccgccgctcagccgagcatatcggtgcttcaaacaaggaggtaacgcagaacatagaggatatgaacagcgttatatcaaatgtctttgctaacagcgaaacggtaacaagagagcttggcacggtaagccataatatcaccggtaacagcgacgcccttcagcacgttgcggcggctatagaggagaactctgcgggaacgcagactctcgactcgatggtgaagcagataaagtcaatggctgccgagcttgaacagcttacagagtga

SEQ ID NO: 517 - DNA, 621 bp, Faecalibacterium prausnitzii
  misc_feature: SEQ ID N?1249264
atgagaaaaaagctgaacaactgtttacaaaagagtaacaagctggtatactttacggcagtgaataacgacgcgattcaagggagatggaacaacgtggaaactgcaccgcatcacgcatggaaaaaactgtcggcgctgctcatgacgctggcgctgatgatgacgcttctgcctgcggctctggctgtggacttaaacgttgacgccgggttctacttcaagcagagccggggcggcacctgcacactggcttcggccgcgatgatgctgcgccgccgcgcttactttgatggtctggacggatgggtcgatgtgaccgagaacagcatcaagagcacggcgtgggccggcggtctgtcccacagttttacatacaatgcgatgcacgttggctacgccacccttccttccggcaaggcggccaagaccgaagccctcatccggatcttgcaggagcacccggagggcatcgtcttgtatgaccgcagccagccccacgcggtgctgctgaccgactacacgaacggcgtcttctactgctcagacccggcgaacggcgtttctgcgggccgtgtgccgctgtccagcgccagcatctcgatcgctggggcgtcctgc

SEQ ID NO: 518 - DNA, 135 bp, Eubacterium siraeum
  misc_feature: SEQ ID N?1249351
atgaacgatacatggaatccttggcacggttgcagaaaaatcagtgcaggatgcaaaaactgttacgtctacagacgtgacgcacaatatgatattgacagcacggcagtagtgaaaaacaaaacgttttacgct

SEQ ID NO: 519 - DNA, 1065 bp, Eubacterium siraeum
  misc_feature: SEQ ID N?1249680
atgagaataaaaggaattgatatcagcagggcgcaggagaaatttgattttaccgcggcgcaggcggcaggaaacaaatttgttataatccgtgcgggaatagggaaagacgaggacagctatttccggcagaatataatcgaatgtgcaaaacgcgggttggcatacggctgttattggtatatcacggcgcttgacaacgctgaactggacagtcagataaaagcgtgtataaaggtgctgggcaatgaaaagccgtcatatcccgtgttctttgacatggaagagcagaagcagattgataatcttacaagcaaagcgagaaccgatatggcggtgaaattctgcaaaagcctgaatgaagcgggtctgccgtcgggaatttatgcaaatccctcatggcttgaaagctattatcagaaagaacggttactcggaaagtatgatatatggcttgctcactggacggaaagtccggactatccgagcagattcgattacgggcagaaaatgtggcagtggggtattgacaatatcggcggtaaagatgttgacggggatatttgctttgttgattatcctgcgataaccgcaaggtggtacgaggagcactgcatagaaaagcctcccgaaaagcccgatgatgagaagcacaacggattttcaaagggggataaggtaagagtaaagcgggacgctgtatttacaaacggggtcaagccttattcttatgtttatgacacggtctatacggtactgcaggtatccggtaacggtaaggaaacgctgatagggcttgacggcgtacctacagggtggctgtatacggcagatctttacaaggcggaggacgatacgcagacacagaaatttgtcgtgggagataaggtgaaagtgaattacggtgcaaagacgtacaacggaggagcgcttgcactgtttgtgtatacgaatgtgtacgaggttatgcaggcaggctccggcgacagagaggactatatcgttatcggtcagggcggagagatcactgcggcggtaagggcggaggatctgaagaaaatttaa

SEQ ID NO: 520 - DNA, 342 bp, Unknown
  BMI gene
  misc_feature: SEQ ID N?1258139
atggcaaatagagatagaacggtgcggctgcaacttcttgtttcggaaaaagaagctgatatgatacgacagaaaatgcttcaagtgggaactgcaaacttttctatgtatgcacgaaaaatgctgatagacggttatgtgataaaacgagattttaccgagctgaaagctctgacaaatgagcttgccaatcttgcccgaaacatcaatcaaattgctttgcgggcaaatgaaacccgcagcatttaccaacaggatattgacgatttgaagcagtattacggaaatgtaaagcgagcctgtaccgagcggcttgtgaaaatgatagaccaagaaaactga

SEQ ID NO: 521 - DNA, 189 bp, Unknown
  BMI gene
  misc_feature: SEQ ID N?1261624
gtggctgaacagaaaaaattgctatttggcaagaatgcatacgcaacaataaaaggtgcaaaacgagttgatcgtttaacaaatacatcttatgatgtagtagctcgaaaagcagatgaaagaatagaagagaataatcgtgagtatgcagcaacatataaaagggctgcgttattttctgcgaaataa

SEQ ID NO: 522 - DNA, 354 bp, Unknown
  BMI gene
  misc_feature: SEQ ID N?1262548
atgaatacagataaaatttatgcagaacagctcgctaacgaatatgcaccaaaagacacctcaaaggttgtcgcacttcgcaaactggatacgaaagcaaaacttccagctatcatttttgcctatacatttggaattatcgctgctttggtgacgggtatagggatgtgtttttctatgaatgtaattggcaatggaacgagtacaatgtttgtgcttggtgtgattattggaattatcgggttaatgggaatgggaattaactatcctgtttacaggaaaatgctggcaaaaggaaaacaaaagtatgcttttgaaatcatggaactggcaaaagaaatcagcgagaaataa

SEQ ID NO: 523 - DNA, 552 bp, Bifidobacterium dentium
  misc_feature: SEQ ID N?1262550
atggatgaagcatttttgagacttctggagaaaaaggattttgcttatattacagtaaaagaattgtgtgaaacggcaggtgtcaaccgatccaccttttatctacattatgaaacaatggcagatttgctctcggaaagtgtccagtatatgaatgaacaatttctgacttatatgaacatggatacagaaacatttgtcacaaaaatgaaagagtgcccattggatgggctatatcttgttacaccagagtatctgacaccatatcttaattatatcaaagagcaccaacgattatttcgcactgcaatggaacactacgttatattaggaatggatagaagctatgaacaaatgttttgccatgtatttataccgatactggaacggtatggagtaccgaaaaaggacaggcattatatcatggcattttacattcatgggattatggcgattatttcggaatggctgagaacggattgtgatgattccattgaatatatcataaagatgattcagcagtgtgtaaaacgacgcagggaggaaaaatga

SEQ ID NO: 524 - DNA, 1038 bp, Unknown
  BMI gene
  misc_feature: SEQ ID N?1262551
atgaaagcaggtatttatttaggaaaagaacacatagaaattcgagaattgccgttaccagaggttggaaaagatgatgtgctgatacaaaatctctattccagtgtttgtggtacagacgttgccgtgttttcacacggtccgaatacagggcataaagttacggtcggcggtgagtttggacatgagacaatatcccgtgtggttaaagtcggaaagaatgtcaccgattttaccgtgggagaacggatatatccgtatcctcgttatgcgaaagatgatacaaaacgagccgggaccattggtggattttcagaatatattcttattccgaatgccagacgcaattattcgctttatactgttgatgagcgtatctccgacaagcttgcaagtctgatagaaccttttactgttggctgccgtgctgctcgcagaggtatgattcctttgggagagggaaaatatgtttcagggcaaaatgcggtagtttttggaagtggaaccatcggcattgctgctgcggttgcatttaaatactttgggatgaagaaggtcatggtttgcgatttttccgattttcggttaaatctggcgaaaaagctgggctttgagatttgtaatcctgcaacagaagatttcagtaaaagatccaaagaatatttcggtattgccatgtctttaaatggtgcaactgccgacattgactgctggctggatgccgctggtgcagaaaacatattagatgattttctacatctcggaaaaattgagagccgatttgtctctgtcgcagtaaacaataaacctcgcaatatcgacctgctttacatgacctatgcacaacagagcattattggttctggcggctatatgccagaggatgtatgggatgtacaaaaaatcatggcaagtggaaaatgggagttagagagtatcatcactcatgagtttccattggataagctggaacaggcaatccggacagcaggtgatgtagaacacgcaggaaatgtagttgtgaaaatgaaaaattga

SEQ ID NO: 525 - DNA, 591 bp, Bacteroides pectinophilus
  misc_feature: SEQ ID N?1262955
gccataataaagaccggaacttctggtaagtctgcaaaggagcttgccacagatatactggacagtgcagggtgcaggggacttacgggtcttattgatatgtctttagagcagcttatggatataaaaggcataggtatggctaaggcagcacagcttaagtgcatatgtgagctgtcaaggcgcattgctaaaaagcaggcttctgacaggctggatttttcttctccctctgccatagcagagtattatatggaggatatgcgccatctgtcaaaggaaagacttgtgcttattatgcttgacagcaggcttcgtcttataaaggacgttgtgttgtcagttggaactatcaacagttcgcccatatcaccgtcagaggtgttttatgaggcgtgcaggaacagggctgtaagtatagtgctgcttcacaatcatccgagtggtgactctaatcctagcagacaagatatagaagtaaccattcaggtgcttaaagcaggcaggattcttggaatacatcttatagatcatataattattggagataataattacacaagtttaaatgaatatggctgctttgaataa

SEQ ID NO: 526 - DNA, 327 bp, Eubacterium siraeum
  misc_feature: SEQ ID N?1263369
atgaatgttgagatgtgtacagagcatttggatgcattgacagctattttgatgcataatagtctgtataaattctgtattgcacattacaaaagtgagggaaataagccgtttatggcagaattgcatccgcttgcatatatgcttatgctttgtgatgagctgcagtgctgggatagaacggcttacggacgaaattctaaaaaagaattacatctgatgggatgtaattttgagtttttcggaaacaacattaaagcagtttatctatacgatgagcgtgaaatggaaaaagtaaattatattaaatgggcgctggggcaatga

SEQ ID NO: 527 - DNA, 543 bp, Unknown
  BMI gene
  misc_feature: SEQ ID N?1263370
atgataaaaagtgattcggcagatttgtcgcttaagatgctgtttgatatgaatttagatagagttcgttttgaaacggaaaaaacattctttacaacggatggcaaaaaacgctacattgatgtttatggagagagtgatgagctggtaattgtcattgaaaacaaggttaaagccagagaaaatatgaatggaacagatatcggacagacaaaggattacagagattatgtagaagaacacctgaaaaatggacagaaggttgtatgcctgtttattacgcctgacccaaagcagaagccatatgacaagcaggatgatcaatgttatatgcttttactagatgatgataaaaagccttattttaattctaaaggtgaaaaaattggttattataaagcgtgttcgcaggctggtgttgatgcaataaatttatatcgtaaaagaaacaatattgaagccagacttgaaacgcttaatggtccggtatattggaagacaaaagaaggcgttacaataaagtcactgatagactcgttgtag

SEQ ID NO: 528 - DNA, 171 bp, Unknown
  BMI gene
  misc_feature: SEQ ID N?1263621
atgcggaggtcagcttttgtttacgcgtgtttatatttcgcaggaaattcaaaaagagttaacatattgttaacaattagagttttaatcggtgatataatcagctatacttgtacggtcatggtgcatgaaaatgcggttgattgtatatcagaagtattaagaaactaa

SEQ ID NO: 529 - DNA, 495 bp, Eubacterium hallii
  misc_feature: SEQ ID N?1263641
atgcaaaggaaacttagaggaggagtagtagtggaaaagaaaaaatggaacagagttttgccaatgcttctggtaatggtgacagctatatcacttttgtcaggctgtggcggcaaaagtgcaaaaaaagaagatgcagaaacaattacggtgtacttatggagcacaagcatgtatgaaaaatatgcaccatacattcaggaacagcttccggacatcaatgttgaatttgtagtagggaataataatctggatttctacaagtttcttaaggaaaatgggggattaccggatattataacctgctgtcgcttttcactgcatgatgcgagtcccttaaaagacagtcttatggatctgtccacaaccaatgctgccggtgcagtctatgatagctaccttagcaattttatgaatgaagacggaagcgtaaactggattccggtgtgtgcggatgcacacggttttatagtcaacaaagatctttttgaaaag

SEQ ID NO: 530 - DNA, 1176 bp, Alkaliphilus oremlandii
  misc_feature: SEQ ID N?1264797
atgattaaagatggatttctatatctggctgcacttatatttgctgcggctatattagttaatttacctaagatattcaaaggtaaaaaggctcaggtcttttttaactttgcaccacctatcgtacttatataccttggacttatgctcctttgtaccttaaaggtatgggacttaagcgcaacaagtgctgtatataagtcagttaaaaacccgatattatatgcgatgttattcttaatgttattacgttgtgaccttaagaagatagctaagttaggtcctaagatgcttataggtttctttgccgctacattatcaataggtcttggttttgttgtttcatatgcgatattccaccagtggcttggtgaggggtcatggaaagccctcggcgcgctttgcggaagctggatgggcggcggcggtaatatgcttgctattcaggcagctatcggcgtagatgaggctactatggcatatgcgcttgttatggactctatatgtgcaacattatacgtaatgttccttttatgggctattggagaacacaagaagttcaatgcatggacaaaggcagacacaagcattatcgatggcgttggagctgcactcgaagaggaagcaaaggctaatactaagccattagtatggcagaacatcatattattacttggtgccggacttttagtatcagctttatctatggagttaggtacacctcttaacaagcttatgccagtatttgacagctcaacatggacggtacttgtagtcacagttcttggtatattattcgcccttacaccatttggtaagattaagggaacagaggaaatatctaatgttatgttatatatcgttatcgcacttattgcttcaagagctgacttaagtgcagttggtaatgcaccaatatggctgcttgcaggttttgtaatacttgttatccacgtagttattatgattattcttgcaaaggtattaaagatggatatattcacatgctgcgttgcatcacttgccaacataggtggtacagccacagcaccagttcttgcaggcgcatactcaacagccctcgtaccagtaggtattattatggcgctgttaggctatgtcataggaacaggtggcggacttatagttgctaatattatgagtctgtttggatag

SEQ ID NO: 531 - DNA, 114 bp, Unknown
  BMI gene
  misc_feature: SEQ ID N?1265580
gttgaagaaataaggcgaggaactatttgtaaagctaatctagagtactttaacatggcttacctcgtgactttagcaacagctaaagaatatttatttatcataattaattga

SEQ ID NO: 532 - DNA, 1824 bp, Eubacterium siraeum
  misc_feature: SEQ ID N?1265583
atgaaacaggaagaaagcagacaggcgcagatgaataattacagggcttttggaagaagacccggtaacaggaatatgacagttgagaagccacaggatggaaagaaaacgttaaaaagactgttaggatactttgtggcggagaagaaaatgctggttatgcttatgttagcagtggttgttgtagttgtatgttcagtatatgcaccacggcttcaaagcaatgccatagatgcaataacacagggggagtggaaaagtcttactcctatacttatagttatggttatagtatatatcatacatagtctgtgtacatttttacagagtaaattaagtgctatattaagccagaatatagttgccaggatgagaaaagaccttttttcgtgtatagttaatcttcctattaagtatcttgatatgaacagccatggtgatattatgagccgtatgactaatgatgtcgaaaatatatcaacaacggtgtcacagtcaatgagttcacttttttcggggatacttacgattataggaacggttgtaatgatggtggctttatgtccgcagcttgcagtattatcgtgtgtgacagttatactcacaatagcggcaacaaagtttttatcgaaggctatgagggtatttttcaggaaaaggcaggtgttactcggacagcttaatggcaatgtcgaggaaatggtgacaggctataagacagttgttgcgtataacaggcagcaggcggttgtaagtgactttgacggcgtgtctgacgaacttaccaaggttggtattatagcagaaattcttggcggttctatgggaccggtgatgaatgtaatcaataatataggtttcgttataatagctgcatttggaggttattttgctattaaccatataatatctataggtgtaatatcagcatttatagtgtatgcgaagcagtttggaagacctatagacgaacttgcgcagatatacgggcagatacagacagcgattgcgggtgctgaaagagtatttgcagttatggatgagccacttgaagataagagcggtgataagacgatggataacttaaagggagttattaagtttgaaaatgtaaacttctcatatacagatgataagcaggtgttatatgactttaatcttgaggtaaaagcagggcataaggttgcacttgtaggttcaacgggaagtggaaaaacgacagtagtcaaccttcttatgcgtttctatgatgttgacagcggacgtatacttatagatgacgttaatattaaagatatagattgtgataatctgagaaaaaatacagcgatagtacttcaggatacagtgctttttgcagatagtgtgaagaataatcttaagtattctaacagtgaggcaactgatgagcagatgtatgaagcagcacgtatgagtaactgtgataatatgataagaaagctgccggataagtatgatactaagcttatgtcagagggtgagaatatatcacagggacaaagacagcttctatccatagcgagagcatttcttgcgcagcctaagatacttatattggatgaggcaacatcaagtgttgatacaagaacagaaaagcatatacaggatgcgatggttaagcttatgaagaacagaacaagccttataatcgcacacaggctctcaacgatacaggatgcagaccttatagttgttatggatgagggaaggatagtggaaacgggcaaccatagtgagcttttagagaaaaaaggcagatattaccagctttatatgacacagtttgcaggagaagcaatttag

SEQ ID NO: 533 - DNA, 351 bp, Unknown
  BMI gene
  misc_feature: SEQ ID N?1265698
atgactattggtgaacgcatgcgtagccgccggaaacagcttggtttttccgctgaatatattgccgaaaaactcggctgctctcctgctaccatatatcgctatgaaaacggatatattgaaaagatgcctattgactccgtctcccctattgcgtctattctcggcgtcactcccgcttacctgatgggctgggaagatgaattcggcgcagaaaaaaccgccgccggtgaaggcgacggtctttccccattggagaaaaggcttatgcagttggtgcatcgtctctcggacgatcagaaggagatgctgctggcgcagatagaactgctgctaagtaagcaagggtga

SEQ ID NO: 534 - DNA, 399 bp, Unknown
  BMI gene
  misc_feature: SEQ ID N?1266195
agcatgatcatgccaaatagtctgtcagcatacacaagcaagatgagtggagctgagctaaaagagatggttagaaattttgtagaaggctatgagggcggtttcatcccatttaaccgtggttctctgccagtattcagcggcatttctgtggaagtcaaagaaacagatgatggttatatattgagcaaagttataaaagatggaaaaaaggttcaggacaatgatactttcacagtaacctgccttgcggcaccaaaacacatgaaagcttatccagcagatgcgaatgttgtgtttgaggaaggagatagcactgtggaagatacctggacgggatatgtttcagatggtgatgctgttcttgcagagccggaagactacatgactctgaggtga

SEQ ID NO: 535 - DNA, 237 bp, Bacteroides plebeius
  misc_feature: SEQ ID N?1266545
atggaaggaagaacaaataaaagtcccgcccgtgacgagatgctgcgcctgacgcttcaggctgaacggtcaacgccgtgtaatgacctaatgtggagctctaccggccttggtacactggggcgaatggctatttacaaaacagcggctaatccgtatgagctggctgttgcagacagccatgttaccgttatacgccctctgaaacagtttgtcctgccggaatacttgtactaa

SEQ ID NO: 536 - DNA, 279 bp, Unknown
  BMI gene
  misc_feature: SEQ ID N?1266570
gtgacagaaacaatattattgctgatagaaattaaatcagaagattttttccaaataaccgttttgttctcagtaccagtaacattaacggttaattctatcgtattgccgtatctaacagccttaggtccagaaaccgaaatagaaatctcgttcttgatcgaagaagaacttgggatagaagaactcgaactgctggaagaaggaagtgaagtagaaatactagaagaagaacttgatgaagaacttgatgaagaacttgaagaattagttgtttga

SEQ ID NO: 537 - DNA, 396 bp, Unknown
  BMI gene
  misc_feature: SEQ ID N?1270329
atgaaagaaaaacttttaagattagcatttaatgaggataaagtacagaataaattatttattttaaccacaattttggtttgggtgttgtatggattaactggctgcgaattcctatttgctttagtaggaattatggtttttggtattgcatttgtatatgaaatcaaggaaataggaataccaaagataaaaaagaatggaattataaagattcttgtttcaacgtggacagtttggttcatagtacttggcttaatatttgtttttataattaaatactatatgacaatatcgtcagacataatcaattgcataattacagcaattgtaggaataatcgcaatgtgcgttgtggcttttgaacttaaacatatattttataaaaaactttaa

SEQ ID NO: 538 - DNA, 597 bp, Roseburia inulinivorans
  misc_feature: SEQ ID N?1270827
atggacatatacagcggtcatattaataagttaatagagcagttgtcaagattaccaggggttggggctaaaagcgcccagcgcctggcatttcacattataaatatgcctaaggaagaggtacagtcaatagccgatgccatgataagtgccaaggaaaatgtccactactgtaaggaatgttttacactcacagatgatgagctgtgtccgatatgtaaaaatcctgccagaaatcataagcagattatggttgttgaacatacaagagatatggcggcttatgaaaaaacaggcaagtatgaaggcgtatatcatgtactccacggtgcgataagccctatgcttggaataggtccatcggatattaagcttgcagagcttatgaaaagactccagaaggacgtagatgaggttattatagcgactaattccaatcttgaaggtgaaacaacagctatgtatataagcaagatgataaagcaggcaggaattaaggttacaagaatagcaagcggcgttcctgtaggcggtgaccttgagtatatagatgaagttacgctcttgagggcattggacggcagagtcgaattgtaa

SEQ ID NO: 539 - DNA, 909 bp, Bacteroides pectinophilus
  misc_feature: SEQ ID N?1270940
ttgactacaggagtttataacgcaactaaaaaggatggttctgtatattacagagtttctataacatataaaaataagcatataagcataggcagctatgacagtgaggaacttgcttctatggcatacatcacagcctgcgatataatatcaaagcccgatatatattatattgatgccgatcttcacacaacatcctatgaactgcttaaggattatcctgtaccttttccatatgccaagtttataagtcttatcaacttccgcgacaatggcatatacataaaaactcctatatacctttgcgataagttattcttatattttcttacaccggaaactactcttatcttctcaacagatgaccttttttattattcccatcacactattatgtgccgtggtggatactacttcgtcaacgattatggtatgcagacaagcatacttgcaagatttggcatacgaaaccactccgtcaagggaaaagactacattttccgcaatggtgatgaacacgatttccgctatgaaaatgtatgtgtcatcaacaaatacaacggagtcagccatattgaaaaaaacggacgtataatgttccagagccgcatacacatcaatggcgattttataataggaacctacagcaccgaacacgaagctgccatagcctacaacaaagctgctgatatgttagagcccgtattccctgtagcctacacaagaaactacatcgaagacatatcccacataacatacgccgccacatataacaatgttaaaatatcaagaaaattggtagactacataaagaaacttaaagcagtcaagcctatttacacaagccataaatacaacatttttcataaattactaaaaaagaaaatactcccctgccaaccccagaca

SEQ ID NO: 540 - DNA, 699 bp, Unknown
  BMI gene
  misc_feature: SEQ ID N?1271198
atgaataataataatcaggagtttgttaatacacttttaaaaagacttgtgaagcttaattatattaaaccgggagatgttcctaatatagacctttatatggatcaggtgacaacatttatggatgagcacttatcagatgtcaagaggcacgaggatgataagatactcactaaaactatgattaataattatacaaagaacaatcttctgccaccgccggtaaagaaaaaatattcaaaggagcatatatacgttttaacatttatatattaccttaagaatatactttcaataagcgatatccagaagcttcttaatccacttactgataagttctttgacacagatgaagttccagaccttgatacgatatacagcgaaatatacagcatggaaaagctacagatagatgcattatcaaaggatgtgttaaacagtacagagcttgcaaaaagcacatttaaagatgtaagtgatgatgaggacagggactttttacagttatttacacttgtctgtctgttaagttttgatgtttatatgaagaaaaatattatcgaaagccttatagacgattacacaagccgcacatcgcaggcaggcagggctaagactaaggaagagattaaggaagaaaaaagggaagcgaaggaagaggcaaaagaagcaaagcgtgctttaaaacagaaaaagtaa

SEQ ID NO: 541 - DNA, 798 bp, Ruminococcus lactaris
  misc_feature: SEQ ID N?1271641
atgattaattggaacaatctagatacacttgcgtcttttaaggggcttaaggatactaaagccgtagaccttgtatctgctatgtctggagagtctggcgctgacagggttaagagctttaacatacctatggcagagggacttaactacaattatgctgccaagcaggtagactcagatgtattagacaagctcgtaaagcttgctgatgaagcacagcttgctgataagtttgcagctctttataacggcgaagttgtaaacactggtgagaaaagacttgttcttcaccatatgacacgcggccagctcggtgaagctgtagaggctgacggcgttgacaagagaactttctataagacacagcaggaacgtatcgctgaatttgccaataaggtacatagcggtgagattgccaatactgccggcgaaaagtttacaactgtagtacagataggtatcggcggaagtgacttaggtcctcgtgcgatgtacatagctcttgaaaactgggctaagaagaataactctttcaagatggtggctaagttcataagtaatgttgacccggatgatgcatcagcagtacttgcttctattgacgttgcacattcattatttatacttgtatctaagtcaggtactactcttgaaactcttactaatgaatcttttgttaaggatgctttaaagaaggcaggtcttgacccagcaaagcatatgattgctgtaacaagcgaaacttcacctcttgcaaagagctctgattaccttgatgcattctttatggatgattat

SEQ ID NO: 542 - DNA, 1209 bp, Clostridium phytofermentans
  misc_feature: SEQ ID N?1273216
cctttagaccgtatgcttacggataatcaagtattttatataaaactacatccgtttgtaggaaaggaaatggacttttcgggttataaacatattaagccatatccagatgcgtatgattcctatgaatttatgaatatgtgtgatggacttgtcacagattactctagtgtattctttgactttgccaatacgaagaaaaagattattttatttgcctatgatgaggcagaatacattcagcagagaggtatgtacttagacttaaaggatttaccattccctgttgttaaaacagcaaaacagttagcagaagaattaaatacgccaaagaattatgatgatacagaatttttaaaacgatgctgcacgtatgatggacctggtgcggcagagcgtatttgtagtcatgtcattaaaggacaaaaagtatgcaaggaaatgaaattggatgggcatggaaagaaaaatgtcgtgatgtatagttccagccttcctaaaaacggtttgacggcatcgcttgtaaacttgtttcacaatattgatttagacaagagaaattattatgtatcttttatggaagatgcagtgcgtagagatccgttacgtgtaagacagattccggataaagtaggatttcttccaatttgtagccgtcctgcaatgacaatcaaagaaaaaatcgcgttgatgttatatgaaaataaaaatgtagaaaatgcgtttgtaaataagtacttaacacgtatgtataaacgtgaggtacaaaagcattatggatgtgctaagattgattatgcgatccaatttgcaggatatgaaaagcaattgatccgtttcttccaggaaattgatgcaaagcgtttcattttcgttcataacgatatgttagaagaaatgaaaacgagaaataatcaacatatgccgaccttacgcagtgcataccgcaattatgataaggtagcagtggtgacacaggatttgatggaatcaactagaaaaatcgcaggaaaacatgcaaatttatgcgttgtaaataactgccatgcttatgaattggttcgtcaaaaaggagctatggatgtatattttgataagaatacaaagtccaatgtggagttggaggagttaaatcgtattcttgccagtgatgctaccaaaattgtatcagtaggtagattttcaccagaaaagggacataagatgttg

SEQ ID NO: 543 - DNA, 648 bp, Unknown
  BMI gene
  misc_feature: SEQ ID N?1273610
atgaagttacttgatggttcacagtctggaagcaagtcagctacatcaacaggtgctaagcttgatggtgctagtattgcaacatttagtgcaacaacaatgacatctaatagcattaaaacggatttgtcaggattagcaggttcaacaattacagatacatttgagattgatggaaacacatttaatgtagattggtcaaagggtgatgcgaaggattttctttctaaatattctgttgatttatctgcaatgacagatgctcagacaaagtcttttgctactgatttagaaacattacttaacaatgcagctaaggaagcaggtgttaaggggacagtaactgttaaagctaacgcaacagcaggaaaagtagatataaagagcaataatgatggagaagattcttcatttggctttgtaggaacaactgcgacaacagtaacacaaggagcagcagataccgactcatttggagctgttttattatcaggacaatcagatgccaataaggctaatactgttgatgctacaatgaaagttaatagcacaatagcaaatggttctagctttactatgacaattaatggtacagaggttaaagctacaacaacagcagcaataaacgaaggtgacacattaaagtaa

SEQ ID NO: 544 - DNA, 1407 bp, Unknown
  BMI gene
  misc_feature: SEQ ID N?1281776
atgcctaagaataaggatattaaaaaagtattggttatcggttcgggtcctattgtaatcggacaggctgctgagtttgactatgctggaacacaggcatgccgttctctcaaggaggagggcattgaggtagtacttgtaaactccaacccggctacgattatgacagataaggatatcgctgatgaggtatatatcgagcctctcacaatcaagtctcttgagcagattatcataaaggagaagccggacagcattcttcctacactcggaggtcaggctggtcttaacctggcgatggagattgcagagactggcttccttgaggagcacaatgtaaagctcatcggtacaacagcactcacaatcaagaaggctgaggacagacttgaattcaagactacaatggagaagattggtgagccttgcgcaccttcacttgtcgttgagaatgttgaagatggtattgaatttacgaataaaatcggttatccggttgttcttcgtcctgcttacacacttggaggaagcggcggcggtatagccaagaatgaggaggagttagtcgagattctctctaatggtctccgcctttcaagagtaggtcaggtgcttgtagagagatgtatcgcaggctggaaggaaatcgagtacgaggttatgcgtgacagcgccggcaactgcatcacggtatgtaacatggagaacttagaccctgtcggagtccacaccggagacagtatcgttgtcgcacctagccagacactttcggataaagagtaccagatgcttcgttcatctgcgctcaacattataaatgagcttcagattacaggtggatgtaatgttcagttcgcacttcatcctacaagctttgagtactgtgtaattgaggttaatccaagagtaagccgttcatccgcacttgcatccaaggcaacaggttatcctatcgccaaggttgccgcaaagattgcactcggctatacacttgatgagattaagaacgccatcacgggaaagacctacgcaagcttcgagcctgcacttgactactgtgtagtcaagattccgagacttccttttgataaatttatccacgcttcaagaaagctcacaacacagatgaaggcaaccggtgaggtaatgagcatctgcacgaactttgagggagcactcatgaaggctgtacgttcacttgagcagcatgtggactgccttatgaatgaggattattccggatattcagacgaagagattaccgagatgttaaacagagtagatgacagaagaatctacgttattgcggaggcgataagaagaggcgttacctacgagacaatccatgatataaccaagattgatgtatggtttatagataagcttgcaattcttgttgagatggag

SEQ ID NO: 545 - DNA, 222 bp, Unknown
  BMI gene
  misc_feature: SEQ ID N?1299082
atgggaagcgattttcaacgtacccttatgtgggtgattctggtggcctcctgcttcatgctgtgggacaactggaacgtctacaacggacagccctcctttttcggcgaacccgaagcggtgaagaccgaacagacggccgctgccgccaagacggtttttttcatgatgcgcctccttccatcctcaccgggtcaccgggaacagcagcttctggttctc

SEQ ID NO: 546 - DNA, 1626 bp, Unknown
  BMI gene
  misc_feature: SEQ ID N?1299347
atgagcatgttcaacaaggtctccaagagcttcatgttcggcgaacacgaagtgacgctcaccacgggtgaaatcgcccgtcaggccaccggcgccgtcgtcgtgcagatgggcgacaccgtgatcctcgccaccgtcgttgccaagaaggaaaccaagcccggtcaggacttcttccccctgacggtcgactacatcgaaaaggcctatgccgcgggcaagttccccggcggtttcttcaagcgcgaaggccgtccgtccgaacacgaaaccctgacgagccgcctcatcgaccgcccgatccgcccgcttttcccggacggcttcttcaacgaagtgcaggtcatcattcacgttctgtcggtcgaccccgaaatcaatccggacatcccctcgatgatcggcgcctcggccgctctggcgatctcgggtatccccttcaagggcccgatcggcgcctgccgcgtcggttatgtgaacggcggtttcgtctgcaacccgaccgtcacccagctcaaggactccaagcttgacctcgtcgtggccggcaccgaacgcgccgtgctgatggtcgaatccgaagccgactgcctgcccgaacagacgatgctcgacgccgtgatgttcggccaccagcagatgcaggtggcgatcaatgccattcacgagctcaccgccgaagccggcaagcccgcctgggattggcagcccgcccccaagaacgaagcgctcatcgcccgcatcgccgaaatcgctcaggccgaaatcgaacaggcctacacgatccgctccaagcagcagcgcacggaaaagctccgcgaaatctacgagaaggtcgaagcgcagcttacggccgacgccgaagccgccggcaccgaagttgccgacatgaacgaagtgcacggcatcctctttgagatggaagctcacatcgttcgcaccaacattctcgaaggcaagccccgtatcgacggccgcgacacccgcacggtgcgcccgatcgaaatccgtcagtcgatcgtgccgcgcacgcacggctcggcgctctttacccgcggtgaaacgcaggctctcgttctgacgaccctgggcaccaagcaggacgagcagatcatcgacagcatcatgggcgaaagccgcgaccgcttcatcatgcactacaacatgcccccgttcgccacgggcgaaacgggccgcgtgggcagccccaagcgccgcgaaatcggccacggccgtcttgccaagcgtgctctgaaggccgttctgccgagccaggaagagttcaactactcgatccgcgtcgtttccgaaatctgcgaatccaacggttcgtcctcgatggcttccgtctgcggcgggtgcctctcgatgctcgacgccggcgtgcccctcaaagactacgtcgcgggcgttgccatgggcctgatcaaggaaggcaacaagtttgccgttctcaccgacattctcggtgacgaagaccacctcggcgatatggacttcaaggtggccggcaccgccaacggcgtcacggcccttcagatggacatcaagatcgaaggcatcacggccgaaatcatgcaggctgccctcgcgcaggctcacgaaggccgcatgcacatcctcggc

SEQ ID NO: 547 - DNA, 714 bp, Unknown
  BMI gene
  misc_feature: SEQ ID N?1301623
atggaagccgggcagtgctatacctgccgaatgtgccgggacggcgtgtgtgcctgcggcgaaagctggcgcggcagctgtcccgatacgacctggctgcagcagggtgggtgcgcacaggaagcgccccgcgtttacaaaacatcaatccttgcggtgcgggaatacgccccgcacctgtcagtggtgacgctgtccgtaccgcgcggtcttgcacagcgctgccgcaccctcggcacctacatcatcgtcgaaagcctcggctggcagatcccgctctctgtcctgcgcagcacctatgcggcaggcactgcatcccatactacccctgctgctgcgtcaacggcgggtgctgcaccagcaggctctgcatcaactgatatacaatctgcttctatcaaaactgatacagatctgattccagcatcggcgttcccaccggcaattgacgcagcaggcggcgggcaaatcgagatcgcgatccagccgatcggtcccaaaagcagggcgctcctgcaggacctgacagcgccttggcgtatccgcggaccgttctatggcggcctgaccgcactggggcgcggcgccctgcatccggcggacccgctgctagtcatcgccaagggaaccgctatcgcgccactgatcaacatactggaacgattttgtcaggcaggaacgcaagacatctcttctgcttgtcaggcacaagac

SEQ ID NO: 548 - DNA, 732 bp, Clostridium kluyveri
  misc_feature: SEQ ID N?1302090
atgaaaatgctgaacttctcctcgcgcacggcaaaggagatcctgcgcgcccccgtcaatctcggcttcggtcttggctttccggtggtgcttatcctgctgctgtcggcaatccaggcaaacgtacccgtgtctgtgttccagatcggcagccttgcgcccggcatgaccgtgttcggcctgtcattcatgacgctttttgcggcaacgctcatcgcaaaggatcgcgaaagtgcgcttttgcagaggctttatacaacaccgctcacggctgcagatttcattttcggctatactttgccgctgctgccgatagctctgtgccaggctgcagtgtgctttgtaacggcgtttttcctcggccttgaggtgacggtgaacgtcctgtggtcggtgctcatgataattccggcctcggtgtttttcattgcactcggacttctgtgcggcagtgtgctgagcgtaaagcaggtaggcggcatatgcggcgcgctgctgacaaacctcaccgcatggctgtccggcatatggtttgaccttgagcttgtaggcggcgcgttcaaaacggtggccgagctgctgccgttctgccatgcggtgagagtcgagcaggccgtctgcgcaggaaactttgcggatgtctggccggattgtgcgtgggtcatagcctacgccgtcgccgcagtcattttcgcagtcctggccttcctgcgccaaatgaaacgccagtga

SEQ ID NO: 549 - DNA, 888 bp, Unknown
  BMI gene
  misc_feature: SEQ ID N?1303020
caaatccagttcttcggcgcacgctgcaatcttgcgaaagccctgttgctcgccatcaacggcggacgttgcgaaaacaccggtacagttatggtgaaaaacattcccgtattgaccagtgatacgctgaaatttgaggaagtaatggacaactacaagaaagtattgaccgaaatcgcccgtgtttacaacgaagcgatgaacatcatccattatatgcatgataagtattactacgagaaagcccaaatggcacttgtagataccaacccacgcattaatcttgcttacggtgtagccggactttctatcgcactcgattcactgtcggccatcaaatatgccaaagtaaccgcacgtcgcaacgacatcggtctcactgaaggcttcgacatcgaaggcgaattcccttgcttcggtaatgacaacgacaaggtagaccatctgggtgttgacctggtatatttcttcagcgaagaactgaagaaacttccggtttacaagaatgcccgtccgactctttcattgctgactatcacttccaacgtgatgtatggcaagaagacaggtgctactcccgacggacgtgccaaaggtgtcgcttttgctccgggagccaacccgatgcacggacgcgacaagaacggtgccatcgcttccttgagttccgtagcgaaattacgttaccgcgattcacaggacggtatcagtaacactttctctatcgttcctaaatcactgggagctactgcggaagatcgcatcgagaatctggttaccatgatggacggttacttcaccaaaggtgctcaccacctgaatgtaaacgttctgaaccgtgatatgctgtatgatgccatggaacatccggaaaaatacccgcagctt

SEQ ID NO: 550 - DNA, 420 bp, Eubacterium siraeum
  misc_feature: SEQ ID N?1307816
atgaaaaagaaattatcatcgatattagcgatattgacaattgtcgctgtggcatcacttaccgcctgctcgggaaattctcagccgacagaaagcagtgaagctccgcaaagctcaagtgcagaaaacagcaccgacaactccgataacagcagttcagaagcctccgcaaactcctcgtccgaaaacacatcgtcagacaacggctcagttgatgatacctcgtcaggcaacagttcagccgatgatacatcatcagacaacagctcagctgatgataccgagcctgtcgcacgatccgaaaaaggtgacgctatagccaaaacggcatacgatatgctgggtaagccgttcaccgacggcggatacaaaccggaaaccggcttcgataactccggacttatatactatgcgctgaca

SEQ ID NO: 551 - DNA, 729 bp, Unknown
  BMI gene
  misc_feature: SEQ ID N?1316237
cccaccaagtccggctacacctttgccggttggtacactgacggggatctgaagacgcccgccagcttcgacagcatcaccgccagcaccaccctgtacgccaagtggacggccggaacggagacaaagtacactgtcattcacttctgggaaaacgccaacgatgacgggtactccttcaaagaaagtgagaccaagaccggcgctaccggcgacaagaccaacgccggcgccaagagctatcagggcttcactgcccagaccatcacccagcaggagatcgcgggtgacggctctaccattgtgaaggtgtactacaagcgcaatgtgtattctgtgaggttctacagcaacagtggtatttttggttcttccaaagaatacacaagcttgcggatcaccgccaagtacggcgcctacattggcgaccaatggcccacttacgatgacagcaatgcctgggccacaacagataatggctccacgtatcagagtaatatcgacacgatgcctttgaacggtgcaagcttctacggccccaggagcggctggggttccgagacagcctactactatgtggaagtcctgcctggtgagaccggaacgccgggccctggcaatctgaactatcagctgcatcacagcgacacctctcccggcacaggctatcgtgtcactgacgaggacaagtaccccatcaccggttttaccttcaagacgttttcggca

SEQ ID NO: 552 - DNA, 708 bp, Unknown
  BMI gene
  misc_feature: SEQ ID N?1320576
gtcacagacaaaaaatgggatgtcgcattgtcagctgaaaatgattgcagatctatgctgccgggttccgcagtgaccctttatgcgaatgtaagatattttgagtataaccatgaggaagatttcattacggatgtagagaaaccttacgtactggaatgggatcttgaaaatgaagagcagcgtaatgaggtagaaattgaggcttccggagatcaggcgatcgttaaagccaagatacaagcaggctatcaagaagtaccgattcgactagaggtttatgaagcggatactaatgggaaaagtgtaggagaacctgttgcgagcattgcatttgcgtgttacatcgaagaggaattctacacgatagaactgggcgcttttcagtcggacctgaaaaaaggtcattccatgacggtcgtaccttcgctgatgtaccattatgtaaaggatggcatcaaccatacggagaaagtcgagaacacaagtgtcaagttttgcgtttcaggcaacaataacctcgatattcgcgaagaggatggaaagttcatcatcacaagaccggatgcaggaaatgcaggttttgggattgaaggcaggagcgacggcagctacaaatgcgacagatggtttgaactggattggatcggcgaaggcggcgatgaaccgcaagagccggagcaccgcacctatttcttaggttcgctg

SEQ ID NO: 553 - DNA, 642 bp, Eubacterium hallii
  misc_feature: SEQ ID N?1385412
atgaaaaactatgttttatttgattttgacggcactgttttcgactctgccgaaggtataaccaagagcgttcagtacgcacttggcaagatgggtatacatgcggaaacaagcgagcttatgtgctttgccggccctccgctcgatgagatgttcgcgcagcgctacggcatggatgcgcagtctgcgcaccgggcagtggaattttatcgtgagcgctacactcccataggctgggaagagtgcacgcccttccccggcatgcacgagcttatgggcaagctgcacgcaaagggaatcaagcttgccgttgcaacaagcaagccgcgcgtttttgcgcagaaaatactcgaaaagtacagtatgcaggatgatttcgacctcgtctgcggctcggaattcaacggcgagcgcggccagaagtgggaggtcatagaatacgcgcttgagcagttcggcatttctcccgacgaggcaatcatggtcggcgacaggaaatacgacgttatcggtgcaaagaaatgcggcgttgagtgcatcggagttcgcttcggctacgcagagccgggcgagcttgagcgcgagggcgcggtctacgtcgccgaaaacgccgacgatctttataactacctgacaaaatga

SEQ ID NO: 554 - DNA, 540 bp, Bacteroides pectinophilus
  misc_feature: SEQ ID N?1392436
agaccaatcgttgagggtgctatcgcaagatgccgtgaggcaagaatgttcattatggatacctgtatgaagcctgcaatcagcgagcctcgtgagaaggttggcgaatttgctccgaagatcattcagatcatgatcgacccaaccaagatcggtgatgttgtcggacagcgcggtaagacgatcaatgcactgatcgagagaacaggcgttaagatcgatatcaacgatgaaggtcaggtttctatctgtggtgaggatgaggcaatgatgaatgaggcaaagcgcctgatcgagatcattacaacagacttccatcagggacagatcctcgagggcgaggttgtcagcatcaaggaatttggtgcattcgttgagtttgctcccggcaaggagggaatggtacacatttccaagatcgccaaagagagaatcaaccatgttgaggatgttctgacactcggcgaccatgttaaggtagtatgccttggcaaggacaagatgggcagaatgagcttcagcattaaggatgttaaataa

SEQ ID NO: 555 - DNA, 537 bp, Anaerofustis stercorihominis
  misc_feature: SEQ ID N?1397430
gtcgttgcaaacgccaaggccatccccggctacctcagcatgaccgcgaccaccagcattcaggccgccgaggccggcgagttcggcactctcaagataatatccaccctcgcatgggcgctcggctacttcggcatgccccacgttgttcttcacttcatggccatcgaggacgagaataagctcaagctcagccgccgtgtagctactgtctgggttgttgtttccctgtctgtcgcagtcgtgatcggcattgtcggctactccatggcaaaagagaacatcatcaccatgttcggtgacgcatcctccgcagaggcgctcatcgtttccatcgcggcagtcctgtccgagtacggcgcattcttcgctatcctcgcaggtcttgtccttgcaggcattctcgccgccaccatgtccaccgccgacgttcagctcttggcggcagcaagcgcgatcgctcagaatatcatccgcggagtgttcggcgttcagcttgacgacaaaaagagcatggtcgttgcccgcgtcactgtt

SEQ ID NO: 556 - DNA, 792 bp, Eubacterium hallii
  misc_feature: SEQ ID N?1404443
atgtctgcacagcttgcctttcgcacacaggtgctgtttgatacagatcgtctgatgcaaaaggcccaaggagaaacagagatccttgatgttacctgtacacagttgatccgtttgctaaaccgtaatattacagcatatgttgtggaaaatggaactttatcagggggaaagctgttttctgaagaaaaagaagacacagaagattttttaataccagaagaacagcggattgccagatgggtctatgaaaacagacagcgtgccggtgcatccacgcaatattttccacaagctaaatgtctatatctggcaatccgaaacggaaatagtgtttacggtgtaattggaataccactgcaagaagaaattctggattcttttgaatacagcatcctgctgtctgtaataaatgaatgtgcgcttgcaatggagaatgcgaaaaatgctactgaaaaagagaaaaatgcggttttggctaaaaacgagcaactgcgggcagaccttcttcgggcaatctcccatgatcttcggactccgctttgttcaatttccggcaatgcagatatgttgctgagcaatagtaaccgtctggatgaagctacaaagcatcagatttacaccgatatttatgatgattctgaatggttgatcggagttgtggagaatctgctgtccattaccaggctgaatgatggaagattgaaatttaaatttacagatcagcttttagatgaggtgatttcagagtcgctgcgtcatattagcaggaaacatgatgattataaaatt

SEQ ID NO: 557 - DNA, 909 bp, Unknown
  BMI gene
  misc_feature: SEQ ID N?1420469
atggttatgggtagcattttagtattaggtggagctggatatattggttcccacacagtttatgaattgatcgaagcaggaaatgatgtagtagttgtagataatcttgagacgggatttcgtgcagcggttcatccggaagcaaagttttatgaaggagatattcgtaaccgggcttttattgattcggtatttgataaagaaaatatagatggagttattcattttgcagcaaattcgcaagtaggcgaaagtatgataaagccattaaaatattatagtaataatctttgtggtacagaagtgctgttggagagtatggttgcacatagcgtagataagatagtgttttcttccacggcggcaacatatggagaaccggagcgaattcctattatggaatcggatcgtactcttccgacaaattgttacggcgaaacaaagctgtctatggaaaaaatgttcaaatggacagcatctgcacatgatcttagatatgtttctttgagatattttaatgcctgtggtgctcatccaaatggaaagataggagaagcacataatccggaaacgcatcttattcctttgattctgcaggtgccgaacggaaagagagagtatatttccatctttggaaacgattatgatacgaaagatggtacttgtgtcagagattatattcatgtaaatgatctggcgcaggcacacattcttgctatgaaatatcttcgtgatggaaatgacagcaatatattcaatcttggtaatggagtgggatttactgtaaaagaggttgtagaaactgcaagaaaagtaaccggtcatccgattccggcaaaagaagaacctcgtcggtcaggagatccatctattctgatcgcttccagtgcgaaagcaaaggaagtgttg

SEQ ID NO: 558 - DNA, 705 bp, Unknown
  BMI gene
  misc_feature: SEQ ID N?1429341
atggaggaaaagaaatacttaaaatggtacaacaagataggatacggatctggtgatattgcgggaaatgtagtgtatgcattcctgacatcatttgtgatggtatatctgacagatacgattggattggcatccggtatagtgggaacactgattgccgtttccaaattactcgatggatttacagacatcttttttggatcaatgattgataagacgcatagtaagatgggaaaggcaagaccatggatgctgtatggttacattggttgtgcaattacattggtagcctgttttgcagttccaacaagtcttggaaggacggcacagtatgcgtggttctttatttcgtatacgctgttgaatggcgtgttttatacggcaaataacattgcttattctgctctgacatcacttgttaccaagaacagtaaagagcgtgtgcagatgggttcttgccgtttcatttttgctttttcaaccagtattctgattcaagcagttactgttggatttgttgcaaaatgtggtggagatgcagccgcatggcgtatggttgcaattatttatgcagtgattggattagttgtgaatactatttccacattatctgttaaagaacttccaaaagaggaattaaatgaaggagacacaacaggtgaagaggaaaaaatgggctggttcacgcattcaagctgctggtaa

SEQ ID NO: 559 - DNA, 1623 bp, Unknown
  BMI gene
  misc_feature: SEQ ID N?1446590
atgcgtgccacggggatgacggatgaggatttaagccgtcctttcattgccatttgcaattcctttaatgaggtgattccgggccatgtccacctgaacaaggtagccgccctcatcaaggaggaagtgcgcaaggccggaggaactcccgtggagttcaacctgcccggcgtttgtgacggcattgccatgggccacggcggcatgaagttttccctggccagccgtgagttgatcgcggacagcgtggagacgatgctgagcgcccacgcgtttgacgccatgatctgcattccgaattgcgacaagattgttcccggcatgatcatgggcgccctgcgctgcaatattcccactattttctgcagcggcggcccgatggccgccggcatggcggaggacggcaccgtactggacctgaacagcgtgtttgaggccgtcgcccgcttcaaggcaggcaaaatcaatgcggaggaactccattccctggaatgccgcgcctgccccggcgccggttcctgttccggcatgtttacggccaattccatgaattgcctgagcgaggtaatcggcctggcccttcccggcaacggttccctgctggctacttccgaggaacgcaaggagttctggaagcagaccgcgcgccgcgccgtggagatggcgaaggcggacggtcccctgccgcgcgacatcgtgaaccgtgacgccatcgacaatgcctttgcgatcgatatggcgatgggcggcagctccaataccgtgcttcatacgctggctatcgcccgggaagccggcgtggagtatgacctccagcgcatcaatgacatttccaaacgcaccccgaatatctgcaaggtggccccctcttcccgcttccacatgcaggatgtcctgcgcgccggcggcgtgagcgccatcattcatgagatcgccaggattcccggggctctccacctggattccatgaccgtgagcggaaagacgctgggtgaaacggttgaaggatgcggcattacggatgaaacggtaatccatccgctggaaaaggcttattcccgtgacggcggcctggcgatcctgttcggcaacctggcccaggaaggcgccgtagtgaagaaggccggcgtgcatccggacatgatgagcttccgcggacccgccgtgattttcgagtcccaggaggaagcctgcgaaggcatccttgccgggaaggtgaagtccggcgatgtggtcgtcatccgcaatgagggacccaagggcggccccggcatgcaggagatgctggcccccacgtcctatatcatggggcagggccttggcgcggaagtggcgcttatcacggacggccgtttttccggagccacccacggagcctgcatcggccatatttccccggaagcggcggaaggcggcctgatcggcctgttgcggaacggggatattattgagtattccattccggaccgtacgctgaacgcccatttgagcgaggatgagattgcacgccgccgtgcggagtggcagcccacgtacaacaaggtttcctcctcctggctgagccgttaccgccacctcgccacgaatgccagcaatggcgccgttctccggcgcggggaataa

SEQ ID NO: 560 - DNA, 879 bp, Akkermansia muciniphila
  misc_feature: SEQ ID N?1447147
gccctgacgcctgacgctcccgtgctgcgcggcaccgcccagaacccggacgtttacttccagggccgtgaaacggtcaaccaattctatgaagccacccccgccatcgtgcagaaggccatggacaggtttgcggacctcacgggccgttcctaccatctggtggactactccggcgccccggacgcagaacgcgtgatcatcctgatgggttccggcgcggaagccgtggaagaaacggtggaagccatgatcgcccgtgaaaacgccaaggtgggcgtgctcaaggtgcgcctgttccgccccttccccgccgcggaactgatcaaggcgctccccgccacggtcaggaagatcgccgtgctggaccgcaccaaggaacccggctcccagggcgaaccgctccaccaggacgtcatccaggccctctttgacgcccaaggctccggcacgctccccttcaccaacggcatgcccaaggtggtaggcggccgctacggcctctcctccaaggaattcactcctgccatggtcaagggcgtctatgacagcctggaacaggacgctcccaagaaccacttcaccatcggcatcaacgacgacgtgctgggcaccagccttccgtatgatgaagattactccacggaagcggacgacgtgacgcgcgccatgttcttcggcctcggttccgacggtaccgtgggcgccaacaaggacgccatcaagatcatcggccagcacacggacctgtacgttcagggctacttcgtgtacgactccaagaaggccggttcctccaccatctcccacctgcgcttcggcccgcgcccgatcaagtccacgtacctgatcaccaaggcgaacttcctggcgctgcac

SEQ ID NO: 561 - DNA, 441 bp, Eubacterium siraeum
  misc_feature: SEQ ID N?1447446
atgaaaggattttttattatgaaaacagcagtagtatattggagcggaacaggcaacaccgaggctatggcaggctcagttgcagagggtgcaaagagcgcaggcgcagaggtaagcgtattcacagcggctgacttctcagcagatatggtagatcagtttgattctatcgctttcggttgtccctcaatgggtagcgaacagcttgaggacagcgagtttgagcctatgttcaacgcttgtgaagcaaagctttcaggcaagaaggtaggactattcggttcttacggctggggcgacggcgaatggatgagaaactgggaggaacagtgcatcgcagacggcgcagttatggcaggggaatgtgttatctgcaacgaagctcccgatgacacagcaaccgagcagtgcgttgagctcggtaaggcacttgcatcataa

SEQ ID NO: 562 - DNA, 1239 bp, Akkermansia muciniphila
  misc_feature: SEQ ID N?1447685
gtgaagaacaatccccccacctcccgccagacagccctgacctgcctgatgcgctggcatgaaggccgctcctttgcggaaaccctcgtggaccgggaatgttcgcgggctgcgctttccacggcggacaggcatctggtgcaggccctcgtcttcggcgtgctgcgcaaccagacctggctggaccatgtgatcgactccctgcggaaaggcaggctggacctggaaatgcgccttatcctccaactggggctgtgccagcttttcctgctggggatggcagaccacgccgccgtgtatgaaaccgtcaatcttgcgcccgcacgcctgcgggggcttgtcaacgccatcctgcgcaacgcgcttcggcgggagaaagccatcctggaggaacgggaaaaactgccgcttcccgttctttattccaccccggcgtggctggtgcagcggtggacgcagcagatggagccgcaaacggtccgcgccctgctccactggaacaacaccacgccgcgcctgtacgtccgcgccaatccgctggtccccgtgaacggcatgccagcctccctggctccgctggaccgcgctcccggctggttctccgtagacggcgccctgccgctggaagagatcaaagcgggctccctttacgtggcggacccctccacccgctacgccatcgacctgctggctccccggcccggcgaggaaatcctggacgcctgcgccgcccccggcggcaaatccgccgccatcatcgccgctaccggaggcaaggcgcgcctgaccgccacggacctccatgaacaccgtctgcccaccttgaaggaaaacctggacaggcagggttcctcctccgtccggacggcgcaggcggactggtccctcccctgccctccggaatgggaacgccgttttgacgccgtgcttctggacgtgccctgttccaacaccggggtcatccagcgccgcgtggacgtgcgctggcgcctgaccccgcaggaaatccgccgcctggccgccctccagaggagcattcttgaaaacgcctcccaggccgtcaagccgggcggcaggctggtttattccacctgttccattgacgcggaggaagacggcctggtggtcagggattttctgcaaaaccacccggaatggaccctgaaggaggaaaaactcatccttccccatgaggaaaaatcggacggcgcgtatgcggcccttttgatctgtgcttga

SEQ ID NO: 563 - DNA, 1296 bp, Akkermansia muciniphila
  misc_feature: SEQ ID N?1449123
atgacaaacgatatcaaagctttaattgactactacgagagggaaaaagggctctcccgtgaaaaaattcttctcgctctggaatccgcttttctctccgcctaccgcaagatggttcccggctccggcagcatcaactacctgagggctgaaatcaacgtggacaaggggaaggtgcgcatctttgcggatctggaagtggtgccggatgaagaatactccgacaagttcaaccaaatccccctctccctggccgtcaagctggaccggaacgccgtcctgcacgacctgctgcccaccaacatcacgccgaagggctttggccgcatcgcggtacagactgcccgccagaccatgctccagaagctgctggatgcggaaaaggaaatgctttacgacgagttcaaggaccgcgccggcgatctggtgacgggcaccatccgccgctttgaaaagggggacatctttgtggacctcggcaaattcgagggcgtcatgacctcccgcgaacgcgtgccgaatgaagactacagcgtcggcgaccgcatgcgcttctacgtggtggaagtgcgcacggaagcccgcggaccggaagtcatcctctcccgcagccatccgaatctggtgcgccgcctctttgaatcggaagtggtggaaataggcgaccagaccgtagaaatccacggcatcgcccgtgaagcgggctaccgcaccaaggtggccgtcatcagccatgacgacaaggtggacccggtgggcgcatgcgtaggcatgcgcggagcccgcgtcaaaaacattgtccgggagctcaacaacgaaaaagtggacatcctggaatggacggaggaccccgtcatcttcgtccgggaggccctcagccccgtggaaccgcgggaaatcaccgtggacgaggaagccaaaaaaatcttcgtcatcgtccaggacgacaaggacctctccaaggccatcggccgcaggggccagaacgcccgcctcacctcccgcctgatgggctgggacgtccaggtgcgcgtctttgacgtccaggaagcggaaaaacgccagaaccaggccgcggccgaggaagtgatgcgccaatgccaggccgccgcaaagaccctcagcgaacaactggaaatcccagaagaaaccgccatgggcctagtgaccatgggtgggacggacctggtggccctcaccggatttgaagcttccgacatcgcggaaagcatgggcattcccgcagaggaagccgcccagattctggacaaggcccgggaccttatctcccaataa

SEQ ID NO: 564 - DNA, 1299 bp, Akkermansia muciniphila
  misc_feature: SEQ ID N?1449526
atgagcacaatccgagttcttacattaggatgggaattcccacccctggttaacggggggctgggcattgcctgcctgggcctttccaaggcgctggcaaaaaaagtggatttaagagtgatcgtccccaaggccgatccttccgttctttttgacgggttccagctcactggtctcaacaacgtctcctatcgggaagtggagcaagtggaccggaagtattcctatgacagcttcgccctggtggagcacgcccccattgaactggacccctacaccaccgtggagggggaatccggcgtggtgcagttcaccaaggaaggccgcatcaccttctccaagacgcatgaagcggacctccagctattcaaaaacaaggaggacctctatgccggggacctggccctgaaagtcatccagttctccaaaatcgcggtaaaagtcgccatgcagcaggactttgacatcatccacgcccatgactggatgacttacctggccggcgtggaggtgaaaaaagccacgggcaagcccctggtggtgcacctgcacgcctcccagtttgaccgcgccggagcggacgcccgcggatggatttacgatattgaaaaattcggcatggaacaggcggacgccgtcattccggtcagcaaatacacgggcaccatcgccagcgggcactacgccatagacccccataaaatcttccccatccacaacggggcggaccccgtcaaggttttcaagggaaagaaaaaatttccggaaaagctcgtgctcttcctgggacgcctgacggcccagaaaggtccgggcttcttcctgcaaattgccgccaaggttctggagcagacggacgacgtgcgcttcgtcatggccggtaccggggaaaaactccgccagttgattgaatccggagccttcaagggcgtgggcgacaaattccacttcaccggcttcctgaacaaggacaaggtgaatgacctcctctccatcacggacatctactgcatgccctccgtatcggagcccttcggcctgtcggctctggaagccgcccaattcaacattcccgccgtgatctccaagcagtccggcgtggcggaagtcatgaagggagccctgaaagcggacttctgggacgtcaacaagatggcggaacacatcgtccatctctgcacggatgaggaactgtaccggaaagtggtggaacaaagcacggaggacatcaaggcctccacctgggacgccgccgcagacaaggtcatccgggtttacgaacatgtgctgaaccgctaa

SEQ ID NO: 565 - DNA, 1527 bp, Unknown
  BMI gene
  misc_feature: SEQ ID N?1449696
atgaatgaaataaacaagtcaccggatttggaaatggtcgtgctgcaggaaatcagctccgccattgtcaatgaacgcaacggcacggcgctgctccggcatattctggacgtgctctaccgccgcatgaagatgctgcgcggcaccttcaccatccgccgcgggaacgatctgatgatagaagcgtcccacggcctggacgagcaggagatgaagcgcggccattaccatgtgggggagggcattacgggccatgtggcggaaacggggaggccccatgtgattgaggacatttcccgggattccaggttcctgaaccgtacccgtacccgcaagagcggggaaaaggtggcgttcatctgcgtgcccatcattcatttgcagcaggtgatcggcaccctgagcattgaccgtcccgtggacagggaaacggacctggaacgggaccagaagctgctggagattgtgggcaacatcgtgggggacgcgctggcggccagcctgcaggcgcatgaggaacgggcggccctgatggcggagaacgagaaactgcgccagcttttaacaaccaatccgggcgaactgatcggcaactgccgccccatgctccaggtgtatgaacagatacgccaggtggcccccagcgacgccacggtgctgatccggggcagttccggaacggggaaggagctggtagcgcgcgccgtagtgaacctgagcggcaggaaggacaagccgctggtgacgctgaactgtgcggccatgccggaaaacctgctggaaagcgagttgttcggccatgaaaaaggctccttcaccggagccaccgcccgccgcatcggccgggcggaggcggcggacggaggtaccctgtttctggatgaaatcggggatttgagcctccagatgcaggtgaagctgctgcgctttcttcaggaaaagactttttcccgcgtggggagcaacagggagcttcattccgacgtgcgcttcattgccgccaccagccgcaatctggaggaattgatggcggaaaacaaattccgggaggacttgtactaccggctgaacattttccccatcgtcatgccggacctctccaagcgcaagggggacatcatgctgctggcggaacactttctttccaagttcaacctgaaatacgggaaagatatcaagcggctgtccacgccagccatcaacatgctcatggcctaccactggcccggcaacgtgcgggagctggaaaactgcatggagcgtgcagtcatcacggcgcaggacgactgcatttacggttacaacctgcccgcctccctccaaatgcccagccatgacgccccgtcttcccgtgacggagaggatcatgcggacttgccgacgatggtggattcctttgaacgggaattgattgtggccgcgctgaaacgctctccgggcaacatgtccgcagcggcgcgggaactgggcatttccccacgggtgctccattataaaatgcacaggctgggcctgcaaaaatcatga

SEQ ID NO: 566 - DNA, 870 bp, Eubacterium siraeum
  misc_feature: SEQ ID N?1450020
atgcagatatttttccgaaaggttgtgtgtctgttggaaaaaaagcttaaactttacggtttcaacaacctcacaaagaccctcagctttaacatttatgatgtttgttatgctaaaggggcaagagaacaaaaagaatatattgactatatcgatgagcagtataactcagagcgtctgacgggtatattgtgtgatgttacggatataatcggggcgaatgtgcttaatatttcaaagcaggactacgatccgcagggcgcgagcgtaacactgctgataagtgaaaaggcaaccgacagcatggagatagataagtcatgcaacaggggaatggtggacggaaagccgcttcaccctcagcgcggtgcggcagcagctcccgaaacggtggtggcgcatcttgacaagtcgcacgttacggtgcacacttaccccgaatatcaccccaacaacagtatttctacattcagggtagatattgacgtttcgacctgcggagagatctcgccgcttaatgcgctggattaccttatcggcagtttcgattccgatatcataacgatagattacagggtgaggggctttacccgtgatgtaggcggaagaaagctgtatctcgaccacgatataacttcgatccaggattttatcaacgactatacgctgacgaaatatgacgcaaccgatataaacgtgtatcaggcgaacatattccacacaagacttatggtgcgagagatggatctgaaaaactacctgttcaatacggatatatatgatatcccgcctaaggagcgactgagaattacggagagtctaaggcgagagatgatcgagatatattcgggaatgaatatttacgggtga

SEQ ID NO: 567 - DNA, 297 bp, Eubacterium siraeum
  misc_feature: SEQ ID N?1450465
ttgcaggaggaaagtaatacggatctcattatagaggtgttatgcgatatacttttcgatacaggaacagcggcaagcacaagccacagactgcctaaaccgttaaggataatctgctgtgtgccggcatcacctgcttttgccgtgataattgcgataatggctatagttgcggtaaactgtatacaggatatgcctgtagtaagcatactgctcggcgcacttgatgtaataatgatatttttactgctgagtataatctcaagagcattcggcacaggaaaatgcaaaaagtga

SEQ ID NO: 568 - DNA, 1701 bp, Akkermansia muciniphila
  misc_feature: SEQ ID N?1451813
atgtcctcacacgacttgttaatcattgtcctattcataggcatactggtcgccttcactccgttgctcgggaagtggctggcgaatgttttacagggaaagcggagctggctttccccggttcttggtcccgtggagcgctgcacctaccgtgtggccggcgtggacccctcccgcgaaatggactggaaaaagtatctgacggccgttcttctgttcaacgccgccggattcctcatcctgttcctttccctgctgtgccagaaatggctgccgctgaatcccgccggcacggaaaacatgcggtgggacattgccctgaatacggccatcagcttcatgaccaacacgaactggcagttctactccggcgaagggccggaaggcatcagctactttgtccagatgaccgggctgggcgtgcagaacttcgtcagcgccgccacggggattgccgtcatggccgccctgatccgcggtctgaaaaggaaatgcgcctccactctgggcaacttctgggcggacctgacgcgcagtaccttgtactttctgattccgatttccgtggtcgtcgcgcttctgctggtctcccagggggtggtgcagtcctttgacggacccgccaccgtaccgggcatggacggcgtggagcaggtgattcccaacggtccggcggcctcccaggtggccatcaagcagcttgggacgaacggcggcggcttcttcgggaacaacagcacgcacccctttgaaaaccccacgccgttcagcaacatgattgaaatgctctccctgctcctgatcggctgcgcctgcccgtacgcctacggcgtgatgatcgggaaaaaaaggcagggctggatcatcttcggcgccatgatgcttctgcttgtgacgaccatcgggctttcccagtgggcggaacacacggggaacccgctgttccccggcatggaaatgctggaaggcaaggaagtgcgcctgggcgtgacgaacagctccctctggtccgtggctacgacggcctcctccaacggctccgtgaactgcatgcactgcagcatgtccccactgggcggcggcattgccctgttcaacatgctgctgggtgaagtgatcttcggcggcctgggctgcggcctgtacggcatgctgatgttcgccatgatcactgtcttcctgtgcgggctgatggtggggcgtactcccgaattcctgggcaaaaaaattgaagcgcgggaagtgcgctggtccatggtgggcgttctgctgcccggcataaccgtcctgcttatgagcggactggccgccgctacggaagtggggcgtgaatccatctgcaatgccggaccccacgggctgacggaaatcctgtactgcttcggttcccaggccgggaacaacgggagcgcctttgccggcctggctgtgggggatacgcctttctattccgtgctgggcggcctggcgatgctgctggcccgcttcggagccatcattccggtgatgatcattgcgggcagcatggtatccaagaaaaccgcgcctccggcccagggcaccatggcgacggacaacctgatgttcatggttctgctggtggccgtggtgctgattgtaggcgccctcaccttcttcccggccctggccctggggcccattctggagcatctgctcctgtattcgggaaccatgctgtaa

SEQ ID NO: 569 - DNA, 765 bp, Dictyoglomus thermophilum
  misc_feature: SEQ ID N?1451855
ttagttgaaatggaagttagagaacttctttcttcatatgaattcgacggagataacatcccattcatccacggttcagcattaaaagctctagaagctgctcaagctaacccatcaattaaacgtggtgaagataaatgggttgataaaatttgggaattgatggatgcaatcgattcttacttcccaactccagaacgtgatttagacaaaccattcttgatgccagtagaagacgtattctcaatcactggtcgtggtacagttgcaactggtagagttgaacgtggtatcgttaaagttggtgacgaagttgaattagttggtttaggcgaaactaagaaaactacagttactggtgttgaaatgttcagaaaatctcttgaccaaggtcaagctggtgataacattggtgctttattacgtggtattgataaaactgaaatccaacgtggtcaagtacttgcaaaaccaggtacaattcacccacatacaaaattcacagctaacgtttacgtattgactaaagaagaaggtggacgtcatactccattcttcccaggttacagaccacagttctatatcagaacaactgacgtaactggttcaatcaaatttgacggtcaaatggtaatgcctggtgataacgttgtaatggaagttgaattaatcgctcctgttgcaatcgaagaaggtatgagatttgcaatccgtgaaggcggccacacagttggtgctggtgttgttgacaaaattattgaataa

SEQ ID NO: 570 - DNA, 1368 bp, Unknown
  BMI gene
  misc_feature: SEQ ID N?1453142
atggcatttgaaggactttcggacaagctcggaaaagtattcggcaagctgaaaaatcacggtaagctgaatgaaaaagatgtaaaggaagctatgcgagaggtcaagatggcactgcttgaagcggatgtcagcttcccggtcgtaaaggacttcgtaggaaaagtaagcgagcgtgcagtcggcagtgaggtcatgaacagccttactcccgcacagcaggttatagatatagtacatgatgagctgataaagcttatgggtacggatacggcaaggatcgatttcccgtcaaagcctccgtgcgttattatgatgtgcggtctgcaaggtgcaggtaaaactactcataccgcaaagctcgcaaagtatctaaaaaagcagaacagaagaccgcttttagtagcctgtgatatttaccgtcctgccgctatcgatcagttgaaggtagtaggcgcttcggttgatgcacatgtgtttgagatgggacagacaaatcccgtgaagatagcaaaagagtcaataaagtatgcgaaggacaacggttttgacgttgtaattcttgatacggcaggtcgtctgcatatagatgaggacctgatgaacgagctgaaagacataaaggctgaggttcagccgaatgagatattgcttgttgttgactctatgaccggtcaggatgctgtaaacgttgcaaaatcgttcaacgatatgcttgacattacgggcgttatccttacaaagctggacggcgatacacgaggcggtgcggctctgtcagtcctttccgttacgggcaagccgatcaagtttgcaggtgtcggggagaagacagacgaccttgagcagttccaccccaaccgtatggctgacagaatactcggcatgggcgatgtgctttcactcatcgaaaaggctaagataaatgttgatgagaaggagcaggaaaagctcgcaaagcgtctgcaggaaaacaagttcgatatgaacgacctgtacgcgcagtttgaacagattgagaagatgggaagcatctcatctcttataaagatgatccccggtgtagcgggcaaggtcaaggaagaggatatagacgagcgcagaatgtaccgcactaaggctataatttcttcaatgacaaaaaaagagcgcgaaaagccctcaattatcgatgccaagcgtaagcgcagaattgcggcaggcagcggtacaaaggtcgaagatgtaaatcagcttctcaaacagtttgaaggtatgcagaagatgatgaagcagatgggacttaagggcggtaaaaagcgtaaatttccgaaattccccatgggtggcatgggaggaatgaacggcatgggcggcttcccgatgtaa

SEQ ID NO: 571 - DNA, 504 bp, Unknown
  BMI gene
  misc_feature: SEQ ID N?1454732
ggttttaccatcgtagaactcgtcatcgtggtggcagtcatcgctattttggcggcagtgttgatccccacattcagtaatctgatcaaaaaggcaaatctttcgtccgaccaggtggcggtgcgcaacatgaacaacgcgctggcaatggacgaggcagtgaacggcaagcccgtcgacctgttggacgccatgaagcgcatgcaggtaaacggttacgacttcgacagctacaagcctctgaccgaagggtatcgctttttctggaattcggaggcaaacaaagtggtactggcgcaggcgcaggtgaacgaaaaggatgagacggtttacgtcatcacttaccccgcggatttggcaaatacggaatttgataccgcgctctacaaggcgctctaccgcgataccgtggcttcccgcacagcggtagaaaagctgagaactgaaattacggcggcaagcgaaacagcggaaaaaacggtggaagttgaagatgccaacgag

SEQ ID NO: 572 - DNA, 300 bp, Eubacterium siraeum
  misc_feature: SEQ ID N?1454745
atgacgattacccattctgatcaaaataaggaggataatacaatggctgaaagagaaaagaatgaaaagtcaacagttcgtactatgaagcgcacaagaaaaaaggtttgcgcattctgtgccgacagagctgaattcattgattataaggatgtagcaaagctcaagaagtgcatgacagagcgttacaaaattctgccccgcagagtaacaggctgctgcgcataccaccagagagagcttacaactgctatcaagaaggctagacaggtagctcttattccttatgtttctgactaa

SEQ ID NO: 573 - DNA, 450 bp, Eubacterium siraeum
  misc_feature: SEQ ID N?1455568
atgttacccgcaattttcaatgaaaacttatttgacaatttcttcaatgatgacttctatatgccgtcggtattcggcggtaagaacgatccgctttacggcaagcacgcaaagaacgttatgaagacagatgtccgcgaaaccgacaacagctacgagcttgatatcgatctgccgggcttcaagaaagaagatgtatcgctgaagcttgacagcggctaccttacgatcactgcttccaaaggtcttgaaaaggacgaaaaggagaagaaggacggcaagtacatcagacgtgaacgttatgacggtcagtgcagcaggagcttctatgtaggcgagggcgtacaggctaaggacgtaaacgccaagtttgaggacggtattttaaaggtatctgttccgaaagccgctccgcaggttgaaacggataacgtaattgctatcgaataa

SEQ ID NO: 574 - DNA, 3150 bp, Unknown
  BMI gene
  misc_feature: SEQ ID N?1456520
atggcaggagcatacacggaagacagctatgaaaagtctgtagtggaactattccagaacatgggctacacccacgtttacggccccgacgtggagcgcgactatcaccttcccttttatgaagatgaattgaaaagcgccattttccacttaaaccccgctttgccgaaagaggctgtgacggaagcgctcaacaaattaaaaaacattgataatggagagcttgtacagcgaaatgccgtgtttatgaactatctgcaaaatggaatttccgtacaataccgcgacaagggcgaactccgttccgacattgtctacctggcggattacaacaatccggccaataattcctttgtcgtggccaatcaatggacattcatggaaaacagctgcaagaggccggacatgattctgttcctgaacggcttgcctgtcgtgcttgttgagttgaaatctccttcccgggaagagacggacgcttccgaagcctaccggcagctccgcaattacatgaaggaaatcccttccatattcgtttacaatgtcatttgcgtgatgagcgaccaaatgacttccaaggccggaaccattacctccggagaagaccgtttcatggaatggaaaacggtcgacggcagttatgaaaatactaggttcgcccaatttgacaccttcttcgagggactgttccaaaaacaacgcctgctggatattcttaaaaactttatctgtttttccaataacggaaaagaggccattaaaatactggcgggctaccatcagtattttgccgttaaaaaagccattgaatctacccggaacgccactcttaccgacggcaagggcggggtgttctggcatacgcaggggagcggcaaatcactgtccatggttttttacgcccacctcctgcaagaggctctggaaagcccgaccatcgttgtgcttaccgacaggaacgacctggacgaccagttatacgggcaattcgccaaatgcaagggcttcctgaggcaggaacccatccgggcagaaagcagggaacacctgaaaaaacttttacacgggaggaaagccaacgggattttcttcaccaccatgcagaagtttgaggaatcccatgaggctctttccgaacgcagaaacatcatcgtcatggcggatgaggcccaccgggggcaatacggactggcggaaaagatcagaatctccacaaatgaagaaggagagaaaattgccaaaagagttgtcggcacggcgcgcatgatccgcaacagcctgccgaacgccacctatatcggctttacgggaactcccgtctccaccaaagacagaagcacccgtgaagtgttcggggactacattgacgtctacgacatgactcaggcggttgaggacggagccacccgcccggtttactatgaaagccgggtgatcaaactgaatctggatcaggaaaccctgaagcggattgatgacgaatacgagctcatggccgccaacgccgacccggacgtgattgaacgcagcaagcggcagctggggcaaatggaagccattctgggcaatgacaacaccattaattcccttgtccacgacattctggaccactatgagcattaccgggaaggcctgctgacgggcaaggccatgattgtggcttattcccgccccatcgccatgaaaatttaccggcgcatgctggaattgcgcccgggatggaaagaaaaggcaaaggtggtgatgacttccggaaataatgatccggaagaatggagggaaatcatcggcaacaagagctgcaggaatgaattggccagggagttcaaggataatgacagcccgatgaaaattgccattgtggtagatatgtggctgaccgggtttgacgtaccctccctggcgaccatgtatgtctacaagccgatgagcggccataacctcatgcaagccattgcccgcgtcaaccgcgtgttcggcgacaaggaaggggggttggtggtggattatgtgggcatcgcttccgccctgaaacaggcgatgaacgactatacgggccgggataaagccaactacggagataccgacgtggccaaagcggcccatcccaagtttctggaaaaactcagcatctgccgggatttgttccatggatttgactattccggattcacgacgggtactgatcttgaacgggccagatgtatcagcggagcagttaattttatcattggcagggataaggaaaagaaacaggaatgtttcctcaaggaagcgctgatgctgcgccaggccctgtccctgtgcgcttccattgcccaggaagccgaccggttcgaagcagccttctttgagtccgtccgggtcctggtgcaaaggctcagaaacgcgggcgccgggaagaaaatctccctgaaggagatgaacgacagaattaacgcgctgttaaaacaaagcatccggagcgaaggcgtcatcaatctattctccgacgtttccagggagttttcactttttgaccaaacgtttctggaggaaattgcgaggatgaaagaaaagaaccttgctctggaattgcttaaaaagctgattcttgagcaggtctccatttacaagaggaccaacatcgtcaagtcggaaaaatttagcgagaagatgcagcggttgattaattcctacatcaacggcttaattactaatgaagaagtcatcgcggagatgctgaaactcgctaaacagatagcggaagcccacaaggaaggtaaaaataatggcctttcctctgaagaagaggctttttacgatgcgctgaacaggccgcaggccgttaaggatttttataaaaatgacgagctgatcgccatgagcagggaattgacagaggctctgcgcagaaacagcaccatcgactggcaaaagcgcacccaggcgcgggcaaaaatgcgcatcatgatcaaacgccttttgaagaagtacaactacccgcctgatgatgtgccgaaggctcttcaaaccgtcatgagacagtgtgagctgtgggcagacaacattatggatgtcggaaaaaagagttatttgaatgattcttccgaggatgagggagccctcagagtagcggaagatccggaacaatactgggtcaacagttga

SEQ ID NO: 575 - DNA, 756 bp, Eubacterium siraeum
  misc_feature: SEQ ID N?1457133
atggcggaagaactcgaaaaatggagatatccaagatttttctcggatacgatagacgaagacggcaaaacaatatatatgaacagcgaagactcaaagcatatcgcacaggtgctgagaatgagaagcggtgacaaggctattatctgtgacaaaaacggtcatgattatctgtgcgagctgtcaccgattgagaataaaagccctgtagaatttgtgattctcgacaaaaagaacaatgcggcagagcccgatgtagaaataacgctctttcaggctattccgaagaacgataagcttgatttcattgtgcagaaagcaactgaactcggcgcggcgcgtgttgttccgtttctgtcaaagcgctgtgtttcccgccctgatgccaaaagtgcagataaaaaggtacagcgcctacagcgcatagcgtatgaagcttccaagcaatgcggcagaggaaaaattcccgaggttatgccttttaccgattttaagtctgcagtaaacagtatagacagcaacactctgccgataattttctatgaatgcggcggaaaaaagctgtcagagcttgacatgtcacataagaaaatagctgtattcatcggtagcgagggcggttttgaaaaagaagaagtggactacgcactttcgaaaggatttaccgcggttcatctcggcgaacgtattttaaggtgcgaaacagcacctgttgcggcacttgccgtattgatgaatttaacaggaaacctataa

SEQ ID NO: 576 - DNA, 2361 bp, Eubacterium siraeum
  misc_feature: SEQ ID N?1457257
atggtaaaaatcagaaaaaagatactcgcagttctgctcacagccgcaatgctcgtatctatgagctccgtagtagcatggtctgacgaacagcctgcaaccgacgagggaacttcacagacagagcagacagcagcagacgataattcttccgaggataaggaagataagtcagacaagaaaaacgataaggacgacaagaagaagcccagaacagacgctgaaggtcttgctgagatgaaagtaattgccgagaacgacagctacaagctttatctcaacgaggaaacaacaaactttgcgttacagtcaaagagcgacagctatgtatggtgggcaactcctctgaatgcagataaggatgaaaacgccaagactgctcagaaaaagaatatgcagtcgcctttctatatcgtatacggcgatgtatcaacacatacaagccagagaatgaatgtttacgacggttcgataaagtccggtgattttgagatccaggaaatcgaaaacggtgtaaagatcatttataggataggtaagatcgaagcggaaattccgatgacgatcacgcttgaaaagaacaatgtaaatgtttcgatcatttcatcggaaataaaggaacaggaagctacagactcaaagggccttgtacttcttgatatcggtcttttacagttcttcaatgcggcaggcatggaggacgagggctatatggtagtacctgacggttcaggcgctgtcatcaattacaacaaccagcgtataaacgctcaggcgtacaacaacgatgtatacggacttgacacatcgataggcttacttacaagaccgtccataacagagcaggtttaccttcctgttataggtgctgttactaacggcgaaaagacaaagcacggctatatggctattgctgagtcaggcgacacctgcgcttctgtaaacgcaacagtaagcggtcagaactcaacatcatataacaatacatggtttgagttcaaggtaagagcagaagatacttactacatgggtactcgtaagcttacggtttacgaacagggcaagataaaccagcccgaccttacagtaggcttctatcctctttcgggtgatgatctttcatatgtagatattgctgaagcatacagaaactacatgatcgaagaaaagggcttcaccgataagaccgataatatcacaaacagcttttaccttgatttgtacggcggcactgtaaaggcacagtccatcgcaggcttccccgtaaaccttgaaacacccgctaccacatatgagcaggcacaggagataatcaaacagctcaatgagcttggcgttgatgatttggttgtaaattacaacgacttcaacggagcaggtatcaagggacttatcacagcagatgtaaattatgcaggtacactcggcggcaaggatgcatataaatctcttgctgagtatgtaaacggcatgaacggtaagctcttcgcaagcgcaggcattacttacatgaaggacagcggaaatggctacagctacacgctcaacgcttgtaaggctacaacaaaggcttacgctaccacaaacaactgggatattgctttcggtatcccgaatcaggtaagactggtaacaaagacgactctgtcaccttattactggaccgacctttataagaagctgataagctcattctccaatgagggaatcaagactatcaacctcagtgatgcgacaacgttgctctacagcgacttcagccgtgacaactactccagaaacgatgcaatgaatatgctcgttgacggatacaagcagttcaaggacgcaggcttcacgcttcacgcaagcggagcaaacgcttatgcgcttccttatattgattacctcactgatgtaccggtaacatcaagcaactttgacctgttcgactatgatatcccgttctatgagatcgttatccatggctatctgccctatacaacaaaggcagtcaacgcaagtgcaaacgcagatgatactatcatgctcgcacttctcacagcaacacctatccactatgatatgatgtatgctgaccccaacgacttcacagacagcgattacgagacactcttctattcaaactacaagggctggctcgaaccctcggctaaggtatacaagctctatcaggatgagcttaaggactttgctaatctccacatcacaaactacacaagaatttccggagatgagcttgagaccgagtttgaaggcggtaagacgatcaaggtaaatacaagagaaatgactctcaccgtcaacggcaaggacatcgatcttgcacaatatggactgaagggagaaacagatgaataa

SEQ ID NO: 577 - DNA, 540 bp, Eubacterium siraeum
  misc_feature: SEQ ID N?1457537
gtggttgttgcggcgggctttttggtggtatcggcgacagttgcagacgtaggcttgcttgttgcagtgcctgtgctgtttgcaggcttgcttgatgtagcggcagaagaactgctttcctgcttgtttgtcgaaggctttgacgtttcagaagaagcatcggacgagttgttttgcttgtctgaactgtcagatgacgaactgttttgcttgtctgaactgtcagatgacgaactgttctgctcgtcggagcttgttttatcagaagtgtctgacgaggtatccgaagacgaaccgctgcctgaggaggcagtatcctgcgatacggtttctgcggaagacactgccgaagctgtcgatgaactgtcggctgacaatgtgccgttatcggcgctgcaaccgcacgctgaggtgataagtgccgcacatagggcgagcaagatcatacgttttttcatgtttctttccttttgcctgcgttataatgtaacattgcaggactttgtattcgattacacagcgattatactacaaatgtga

SEQ ID NO: 578 - DNA, 990 bp, Eubacterium siraeum
  misc_feature: SEQ ID N?1457744
atgaaaaaactaaccaaaacagcagctctaatcttatcgacacttctgttattcggctgtactgataattctacgcagagtggtgtaggtgatactacaccgccgagcgaaagttcgggtacagagagtgaaagcagaaatgatagttctgcaaccgaaagctctgtaacagacagcagttcaatatctggcaattccggtgaggagaataacgagaatcttgtaaagaatattgaggggtatcagacgttttcgtatgatgagaataaatacgaaaatttcaccgaaatagaatatacccaacattattacggcgtgtatgaccgcgccggttcatccgatcctacgaaaaaagaaaatatgaaagcaaacaatcgaagctctataggaataaaatgccgggttgtaggtgacagctattatgtacacggaggtgtatgcggtaatgtcaaaattaccagagaagaggacgactacatatttacacctgttataattgaagaaattgtcgaggacttcggaaatgaaagtgtattttctgttggcgacataatttatgtgcgggaatggtatcgaccggttgaagaatacaatacaaaaacgcctaaatgggtggaagagcaaattgaatatataaaacagcaatatgaagatgaaaacggcaatttcaacagcagttattttagtgaagaaaattttgagtattataaaaaacagcttgaatactatgatattatcggtaaaaatcccgaaaaatatgttgtcaatctatgtgcacctgtaatgatgcaacgaggtcagtcgtatcttgtgtttgcagaaaacgttaaaacgccgaatgaaatcgacgggaatatctattgttatacatataacataatatttgaccttgaaaacgacgctccctatgtagatcagtcggaagagatggttaaaaatctgtaccgatgcggagcttgctatcagaatcagtggaagatacttaaagaa

SEQ ID NO: 579 - DNA, 303 bp, Unknown
  BMI gene
  misc_feature: SEQ ID N?1457750
atgaaagcgtttgatttcggcaatttgctgcgcgggaaaacggttgccgtcgctctttcgggcggcggagattccatggcactccttcactatctctgcgcgcgggcggcggagggcggtttctgcgtcgccgccgttcacgtggaacacgggatccgcggggaggcctctctcaaagacgccgaatttgcggaagcgtattgcagagaacaaaaaattcccttttatcgctatgcggtgagggcgagagagctggcggagcgcgaaaagctgagcctggaagcggctgcgcgccggctgcgg

SEQ ID NO: 580 - DNA, 3396 bp, Unknown
  BMI gene
  misc_feature: SEQ ID N?1458327
atgcagcaattatgggcgcggacggcggagcatgtatcttccctttccgatccgtctgccgcggatgactgcggggatgcgatggcgctgctggctcccgtgttccaggcatggccggacgggcagaaagccggggccgcgctggcggaaatcctttccgttccggcggagcgggtgggagccgtttcttcctgggacggcctgatgaagcatcaggaagccattctggaaaaagtccgcttcctccggctgaagaaactgacggcttattatgatgcggccgccatccgccgcgcggtgaaacgcaaccgggaaaaatacggggaacggtaccctgatgctgaggttttcctggcccggctggatgagtgggagaagaagctggggccgctggaccggtgggtggaccgggcagggccggagcaggcggaccaactgcgtgaactggtggaactgcggaaaaaggcccttattgaatccctgccggaacaggactccctgcgggaatgggtgagcgtgcggcgtttcaacccgtccggaaaaagctccttcaatcatgaccgcccggccaactggcagggaatctccagcatgccgggtccgggccgcacgtaccgcagcggcatcgtgaaatttaacggcatctcctcttcctcccccgcggcgcagctgctgggggacgaccgctggatggggcatctggaagtggacttttccggggaaaggctcatgttcaccggaaaccgcttcggcaagaaggaaaacaggccctgggacgtctttgaactggacctgaaaaccgggaaaacggaagccctcaccgcccacatgccggcggatacggacagctacaactcctgctacctgccggacggccgcgtcatcttcgtcaacacctccggcatgcagggcgtgccctgcgtaaccggggtggactacgtggggaacatccacctttacgaccgggagaggaagacgacccggcggctcacctttgaccaggacaacaactggttccccgccatgctgccggacggccgcgtgatgttcctgcgctgggaatacacggagagcgcccactacttcagccgcgtgctgatgcacatgaatccggacggcagcgaccagaaggaatactacggttccaactcctactggcccaacagcctgttcaacgcccgcccgcttcccggcaggccgggcatgttcgcgggcattgtgagcgggcaccatggtgtcaagcggcttggggaactggtcatctttgacgtgaaccggggccgtaccgccacggagggcgccatgcagaaaatcccgggctacggaaaacccgtggaaaacgtcaccagggaccagttggtggatggattgaaaactccctattttgcggaaccgtatccgctgaatgaggagaccttcctggccgtctcctccccctccggagacaagggcgtcactaatgtggtctggtgcgacatgtacgacaacattgtccctctgaccgcttcatcctatttcatttatgcggaccccgcgccgctgcgcccgcgcacaaagccgcccgtgctccatgaccgcgtgaagccggaaagcaagacggccacggtctatatctccgacgtgtaccggggccgctccatggccggagtgccgaagggggaggcaaaattcttgcgcgtgttcatgtccgagtacagcccccgcaacaccggaagccactatgccatgggcatggaaagcaactgggacttgaaggtgctgtacggcaccgttcccgtgaatccggacggctccgccatctttacggctccggccaaccagccgctgaccctccaggtgctggacggggagggacgcgccctggcgctgatgcggagctggttttccgccatgccgggggaaacgttaagctgcatcggctgccatgaacggcagaactacgcgccgcccgccaaggcggtcatggcctcccggcagaagcctgccgccatcaccccgtggtacggtccggcgcgcaccttctccttcatgaatgaagtgcagcccgtgctggaccgccactgcgtccgctgccacaccgcggaagacaaggcccgcgcgggagtcccggacttcatgacattggaggccgtcaagggtgctcccgctcccgggtccgtcgcgtactggaacctgcacccctacgtgcgccgcaacggtccggaggggaactacctggggctggcccccacggagttcttcgcggatacgtcggaactctaccagctccttaaaaaggggcaccacggcgtggagatgccgcaggaggactggaaccgcctggtcacgtggatggacatgaacgccccctacctgggcgaatggccgggagagcgcaatgaaggattgctgaaacgccgctatgacctgcacaggcaattctccggagcggaacggaattacgtgacgatgaaggattccctgttccggagaaacgccagcggacctgttttcaacggggaaaggcccgttccgggagccagtgaaaaaagcgtgcccgtcccggaaccgcggaatgaaacgctgtccgtggatttggggggtagcgtaagcatgacgttccgccgcattcccgcgggaaaattcaggatgggaagtgaacgggaaaccccggcggaaaaacccgcctccccggtggagattgaacaaccgttctggatgggagaggcggaagtgacgctggagcaataccgccgctttgacccggaatacctcaatggatggtacgacatgcactacaaggaccaggtgaggcccggctacgacatggatgccgatccgcgttttccggccgtccgggtgccgtggaccagggccatggaattctgccgctggctttccgggaaaaccgggaaaaaggtgacgctgcccacggaagcgcagtgggaatacgcggccaggggcggagcggatacggacttcttcttcggggaacgggatgcggacttctcctcatacgccaacctgggggatgtgacgctgaaggagcttgccgtctccggcgtggaccccaagccgattaaaaatcccaaccgtttctgggacttcgtgccgcgggatgaaaaatataatgacgggaagcttcatctggcccccgtcaagagctacaagccgaatgcctacggactgtacgacatgatcggaaacgccgcggaatggacccgttccgaatacaggccctacccgtggaaggaaggggacgggcgcaatgaaagcctggactcccgcgttccccgtgccgtgcgcggcggttcctggtatgaccgcccccggcgggccacgtcctcctggcgctgggggtatcccagctggcggcccgtgtacaacgtggggttccgcgtgatgatagaagactga

SEQ ID NO: 581 - DNA, 714 bp, Ruminococcus lactaris
  misc_feature: SEQ ID N?1458618
atgaaaacattgcaacaggtagtcgatgagagcaagtctatcgtttttttcggcggtgcgggagtatcgaccgagagcggcatacctgatttccgttcgcctgacggactgtacaatcagaaatatgatgttccgccggaagagcttttaagccacgattatttcttttctcataccgaaaaattctttgaattttaccgcgagaaaatgctctgccttgacgcaaagccgaataaggcgcatttaaagctcgctgagcttgaaaatgccggaaagcttacggcggtgataacgcaaaatatagacggactgcatactgcggcgggaagtaagactgtatatgagcttcacggaagtgttcacagaaattactgccttaagtgcggaaaaagctacagcgctgaatatatgctacacagtgatggagtaccgcattgtgagtgcggtgggataatcaagcccgatgttgtgctgtatggcgaaaatctcgatgacaggacggtaacaggcgcactgtcggctatagagaggtgcgacacgcttatcatcggcggaacgtcgcttacagtttatccggcggcgggatttatacgctattttaacggcaataatctggtgcttataaatatgtcgtccacgccttacgataataaggctgaccttgtgatacatgataaggtcggagaagtattggataagataaggataagatga

SEQ ID NO: 582 - DNA, 450 bp, Eubacterium siraeum
  misc_feature: SEQ ID N?1459197
atgacccatatccgccccgcgaccgagtccgatgcttcccgcatcgcagaaattatcgtcacaaattaccgagtaaatttctatccgtttttcaaaaacgatgccttttacttcggtgagctgaatgtccttgacactgccaaggagtactcagcgggctcaaccgcactcaaaaatacatttgtctatgatgacggtataataaaaggcattatccgcatttcgggtaatgaggtcgaaaagctgtatgtagagccgctttttcaaaaccaaggcataggcgcaaagcttctcagatacgctgtcaacaacttcgcggtcaatgaactgtgggtgctcgaatataacaagcagggaatagatttttatcaccgcaacggatttagccttacaggcgaaaaaatcatagaagacgaatttgtaccgcttttaaagatgaaaagagaataa

SEQ ID NO: 583 - DNA, 585 bp, Eubacterium siraeum
  misc_feature: SEQ ID N?1459332
gtggatattaaggagaatttcaagggacatttaagcacgatcaatcatcataagatggaagtgatgagattgtgctttaagctgggcctttataaacagggaatattacacgatctgtcgaaatattcgccgaaagaatttataagcggggtcgtgttctataccggagataaaagcccgaatacgaccgaaagacgtgtgacaggtaaaagtgaggcatggcttcaccataagggaagaaacagacatcactttgaatactggatagattacggacaggagcccggcgcgggaatgcagggcactaagatgccggtcaagtatgtggtggaaatgttctgtgacagaatagcggcgtgcaagacatattataaagagaattataatgacagtatgccgtttgaatatttcaacaagaacagaaaacactatatgatgcatccggaaaccatggagcttttgggaaaaatgctgataatgctgaaaagatacggcgaggaggacacgctggtatacataagggagagaatccttaccggaaagaatccaaaaaagccggcgggaaaaaacagaaaaaaaaaataa

SEQ ID NO: 584 - DNA, 540 bp, Unknown
  BMI gene
  misc_feature: SEQ ID N?1459698
ggggcgctcgccggcattatgggcggattaaacagcgagatcaagaagagtacggaagaaatcgttttggaagcggcgaaatttgcgcgtgacaacgtcagaaagacttcccgtaaattggggcagacctccgattcctccgcacgttttgagaagggaattgacgcttatacgggcgaaatcgcgatgaatcgcgcactgcacctgatcgaagcgctgcattgcggtacgatcgcatgcgatcgctatgatctcggcgcggctttgaccgaaaaagtaatacacacgaccatttccaaaatcaacggcgtgctgggaatctcggttccggcggaaacgattagagagattcttgaaaggctccggttcgtcacggaactgcggggcgacgagatcagcgtgacggttccgccctatcgcgaagacatagaggactatcccgatttggcggaagaggtgattcgggaatacggttacgatcatatcgaatcccatctgatgagtgccgggaaaattacgaagggcggaaaaacgcccgaa

SEQ ID NO: 585 - DNA, 867 bp, Eubacterium siraeum
  misc_feature: SEQ ID N?1460511
ttgagaaaatcacaggattggcaggactacagactgatagatgcatcagacggacagcgccttgaaaagtggggcggtataacgcttgtgcgacccgacccgcagataatatggaaaaatccgaacccctcaccgctgtggaacaaggcggacgcggtatatcaccgttcatcaagcggcggaggtaaatgggagtacaaaaaacagctccccgaaagctggaatattagctacaaaggtcttacctttatggtaaagcccacaggtttcaagcacaccgggatattccctgagcaggcggtcaactgggatctgtgctcagagcttataaagaacgccggcagggaaataaacgtgcttaatatgttcgcctataccggcggcgcaacgctcgcctgtgcaaaggcaggcgcaaaggtatgtcaccttgacgcggtaaagggtatggtagactggggcaggacaaacgcaaagctcagcggtctttcagacaaacccataagatggattgtagatgatgcggtaaaatttctcggcagggagataaggcgcggaaaccgctatgacggcatcatactcgacccaccaagctacggcagaggaacaaacggtgagatgtggaagctcgaggacagtatctgcgaccttatgaatatgtgcaccgaggtgttgaccgaaaagccgctgttcatagtgctcaacagctacacgaccggtctttcgtcatcggtaatgacttaccttttacagatgacggtaggcagaaaatataagataagagtagactcacaggagataggacttcctgttgaacagacgggacttacagttcccgcaggaaacaccgcggtcgtatatttcgattaa

SEQ ID NO: 586 - DNA, 363 bp, Eubacterium siraeum
  misc_feature: SEQ ID N?1460862
aatgataccgctgatgggcgttatgacggttatagggtgacaaaaatgagaaagcgtaaaagtgcattttacttaatccggaatgcggtcgttgctgcggcgctttctgcgtctgcgatagcaatagtaagcgcctctatagcaaacagcaacgaaagccgcaaaagtgagaacctgagcattatcgaaagcggcgtaaggcgggcggcgaccgagtgctatgcggtcgagggattttatcccgatagcctgcaatatcttattgacaattacgatctgcatatcgatgagaacgaatgcatagttcattacagcccggtttcatcaaatataatgcctgagatcagggtcatagcaaggtag

SEQ ID NO: 587 - DNA, 1377 bp, Eubacterium siraeum
  misc_feature: SEQ ID N?1461002
atggaaaacgataacaaattcaacgaaagacatgatagacagaccgtagacgagatactcgccgatatagacagaaaagatacgataaccgagagccttgaagagggcacagacgaaaacgatatgtcggataaagaggtcttgtccgaggaggcatcttatacagacggcgctgaagatgttgaaagcatatcggatgagctttcgggtgcggatgaagcatcggatgagcaggaggcttttgaagaagaaagcaccgcagagtttgaagatgatgaagagaacgcagaagaaccggataatgacggagaagtcaaggcggctgaaaagaagcataacattttttatcgcatggcgaaaggtgttattccgtggaagggcgacaacgcaggacttgtaataagaaaaatcatatttatagttgcgcttatagtttttcttgctacagctatacctctactcgttgatgtaatttcgatgcttaaagaccagcaggtaagtaatcgtatatcacagatgtatcagcttgatgacaccgatgtcccggagaacaatatggacgttcttccgtcattcaagaagctgcttgaaataaatccggacacagtcggttatataaagataaacgatacgcttgtcgattatcctgttgtaaagggaacggataacgacttctatctcactcacgatttctacaagaatgagagcaaaagcggcactgttatgatggattaccacaacaaggtaactccgcagggtcactcgggaaatttgatactctacggtcacaatatggcggtaggtacattcttcgcgccgcttaacgaatactggcgcaccatgtacgattcgtatgacgagccgagtaagtccttctataaagagcacccgataatcaggttcgatacgctgtatgagcaggctgaatggaagatatttggcttcggcatatacaatgttgaagagtcaagaggcgaggtatatggttataatctgaaatacgacttcacctcggaggatgatttcaacgattttatcataaacataatggacagaagcgatattttcaccgatgttgatataaagtacggtgacgatatactgacgctttcgacctgctgctggccgtatgagggcagtgagaaaacggtaagacttgcggtatttgcaagaaagatacgcgagggcgaaagcagggacgttgatgtaagcaaggcggtcgtaaatacctatgtaaagcgttggcagtgggtatatgacaaggtaagcaacggctatgactggtttatgagcacatgggacagaagaaagcttctcagctatacagccgaagacgcaaagcgtgacggttattcgttccccgataaaaccgactga

SEQ ID NO: 588 - DNA, 1239 bp, Eubacterium siraeum
  misc_feature: SEQ ID N?1461903
atggaaattttagacgttttctggaatgcccttgtcgcgcttgcgcaaaagtcgggcttctgcaacataacccctcagcaggggcttatgatagctgtttcattcttacttatgtatcttgctatagtaagaaaatttgaacctctgctgttgcttcctatcgctttcggtatgatgcttaccaatattcccggtgctaatatgttccacccggaaatgttcggtataagcccggatccggcaatagcggcgaactttgccgagaatggtgtaaactacggcgaggtacttcacaacggcggtctgctcgatattctgtatctcggcgttaagcttcagatattccctccgctgatattcttaggtatcggctgtatgacagacttcggtcctctgatagcaaaccccaagagcttactgctcggtgctgccgcacagctcggtatcttcgtaacattccttggtgcttgcgcattcagccttacaggtattgaaggtgtagcgtttacattcaaagaagcagcatctatcggtattatcggcggtgctgacggacctaccgcaatattcctgacatcaaagctagcaccgcaattgctgggttcaatagcggttgccgcatattcttatatggcgctcgttcctgtaatccagcctcctataatgaagctccttacaacaaaaaaagaacgtgccattgtaatggagagcttacgtcccgtatcaaaaagagaaaaaatcatattccctgtcgctgttacgcttatcgttgcttttatcgttcccgatgcaactcctcttgtaggtatgctgatgctcggtaacctcttcagagagagcggcgttgtagacagacttgtaaagacagcatcaaacgagttgatgaacattattactataatgctcggtactgttgtcggtgctacagcaactgctgaaaacttcctgactgtaaagacacttatgatcgttgccctcggactcatcgctttctgcttcggtacagcaggcggtctgttacttgcaaagctcatgaacaagctctcaggcggcaagataaacccccttatcggttcagccggtgtatccgcagttcctatggcagcccgtgtttcacagacggtcggcgctaaggaaaacccctctaacttccttctcatgcacgctatgggaccgaatgttgcaggtgttatcggctctgccgttgccgcaggtgttctgcttaacatcttcggttaa

SEQ ID NO: 589 - DNA, 651 bp, Unknown
  BMI gene
  misc_feature: SEQ ID N?1461916
ctcatgtcaccgccgcagataacagcgtttaccgaacatctgacacgcctgtttcaaacgcttgacgagaatgaaaaaatggcggtcgtcacgatgaactattgtatgctgtatgccgtgtttgaaatgtggccgcaggtggatgtgctgaaagatgcatatgaaagtgccttagctcatctggaggaaacctacgagccgcccgatagcaatacggcgggcattcagttcccgcatacatacgccgcccccgcacaaccgacagcggcggcgattgcccgatatgaacgcaacgcaaagcgccgctggcggccgctgaaaatttaccttattgtaacgggactgtttattgcgttggtgcttgggttatatttttacgccgcacctccgttttctgaaggtcaggagattgtggtaaaggatataaccggacagtcggtgaaaatgctgcccgattctgagcctgtggagcttgccttggtggggctgacggattataacggcgtcgtctgcctgttttacggaatgataacaggcattgtggtgtaccgaatagtgtcaatcatcgccgtgtttatcataaatttactttatcgaaggagaaatgcaaaaaaagctgctgctttaagagcaggcaattatataccgtaa

SEQ ID NO: 590 - DNA, 1254 bp, Eubacterium siraeum
  misc_feature: SEQ ID N?1462425
atgtttcccagattcagaaacaccggactgacaatacgcatatcaaagaacgcagcgcttaaaatactgctgatattcggcagtatcttcggagcattcctgatgacaggtctgctctatttcagaaatgatgtacagataatagacgagaacgaaaagcgtattgtttatacggtaagtgacgatccttacgagatactcagagagaaccatatcactctgggcgcttatgacaggattgagtttaccggcttcgaggaaaacgtggcaactgctactctcactattgagagagcgtttgatgccgacgtactcgaggacggaaagaagacagctacagtgcacagcgttgatgccacggtagcacagcttcttgaacaggcaggcgttgagctcggcaagtacgacaaggtatcaccttccaaggacacggttcttgaagacggtcagaagatagcgatcacaagagcgtatgatgtcaaggtaactgccgatggtaagacaactaccgtaaagtgtcttgataacacggtttccgagcttttgaaaagagccggagtaacgctcggcaagaacgatatggtaagcgaagagcttgaaacaaagatcaccgagcctaccgagataaaggtttcaagagtcgagatcaagaccgaaacgcaggataagacgatcccttatcagacctcaacggttacgaccaacattctggctataggtcagagcgaggttcgcacaaagggtgtaaacggcaagataagaacaactacaacgactacttacatcgacggcgtaaagaccgatgtcaagaagacaacaaaggtagttacaaagaaggttgacgaggttatagccgagggtgcggcgatcgtaactccttattgcaaaattgatgatacatctatcgtacttaagaacggcagacctgttgactatgagtatgtagtatcaggcaaagctacagcctacacagctcccgcgggagcatacacagccagcggcagacttgccgagataggcacagttgcagtaaatcccgatgtgatcccttatggctcaaagctgtacattgtcggtcagtacgacaacatctgctacggctatgctatagcggcagatacaggcgagggtatgatggcaggaacgatccctgttgacgtatatatgggcagcaccgaagagcactatgatgatgcttgtgcatggggtctccagtacgttgatatctatgttgtagaagtcggcaacggctaa

SEQ ID NO: 591 - DNA, 816 bp, Eubacterium siraeum
  misc_feature: SEQ ID N?1462519
atgtcagacggctcactgggtcttgaggaaaccattgcacaggcaaagcgatatggcatcgattattttgcgataaccgaccatgacacactatcttcctcgtcaagggctgtggtactcggacagcgttatggtgtcaacgtgatccctgctgttgagttttctacatacgacagcaaacgtggatccaaagcacacataatatgctataatcccgaaaagccaaacagacttgaaggcttatgcctgcgcacttgtgaactgcgtaagaagcgcggcaaacagatggctatgaaagtacttgaaaagtaccccataacgcttgaaagcatacttcgttacgccacgggcagtaaagtaatattcaagtgtcatatcatgcacgcccttatggactatggctatacgaccgacctttacggaaatgtatatgatgagcttttcaatcccgtgacaggtctttgtgcagaagaggtgagtaccgacatgcaggattatccggaaattcattttgtgctggaacttatccattcggcaggtggtattgcagtacttgcgcaccctgcagtattcgataattttgaactgcttgaggagcttgcctcggcaggtaaaatagacggtgcagaggtatggcatcagagtgctacggaagaacagcgcgaaaggctgctgaaaatagctgaggatcataatctcatcacaaccggaggctctgatttccacggattttacaaccactatcctatagctataggaacaaactacacgccggacgcatcacttcagcgtattctgaagaagaaaataaaataa

SEQ ID NO: 592 - DNA, 399 bp, Eubacterium siraeum
  misc_feature: SEQ ID N?1462920
atgtggtttgacaagctgtggcagaacacagtagatctattcagatcaatggatatacctgtaagaacaattgaatgctgttcaggagatcttgcagaccttaaggtaaagtcttatgacgttgaagcatggtcacccagacagaagaagtactttgaagtaggcagctgttctaaccttggcgatgctcaggctcgccgtttgaaaataagagtgaagagcaaggaaaagggcaactactttgctcatacacttaacaacactgttgttgcgccccccagaatgcttattgcattccttgaaaataatctttgtgccgatggtagtgtaaagatacccgaagttctcagaaagtatatgggtggtatcgataaaatagttcctaaggataataagtaa

SEQ ID NO: 593 - DNA, 846 bp, Eubacterium siraeum
  misc_feature: SEQ ID N?1462921
atggcaaaacgaggagttttaaaccagaactttaacagtatttttgatgataacagctttgacgaagatgaagaaggtataagcaccctcaaactgacagatattgagcctaataaatcacagccaagaaaaaactttgatattgaggctttaaaaacactagctgattcaattagacaaaatggaataatacagccgttgcttattcgatcaatgcctgatggtacatatcagatagtggccggtgagagaagatggcgagcggctaagatggccggtcttaccgaagtaccggtgcttataaaggaattatccgatcagcaggcacagcagatagcgcttatagaaaacctacagcgtgaaaatctaaatccgattgaagaggctaacggctataaagagcttatggaaaagttcggcatgactcaggaagatgttgcaagagtagttggaaaagccagatcttcaatcgcaaattcattgcgtttgcttaatttaccgcctataatagctgaaatggtgtcaaataatgaattgtcaacaggtcactgcaaggttctgcttggcgttaaagaaacaaaggatatggtagagcttgctcataaggctgccggtaaggatgtttccgtccgtgaaatggaaagaatggtaaaagcacttgataagagcgaaaagccggaaaagaaaaaggaaacattctacgtggaggcagagatcagtcttgcaaaggcgcttgaaacaaatgttaatatagtaccgggcaaaaaaaagagtactatacaaatagatttctattctgatgaagatttgaccgatattgtaaatcggctcgcaaataacaaataa

SEQ ID NO: 594 - DNA, 501 bp, Eubacterium siraeum
  misc_feature: SEQ ID N?1463003
gcaacagatgtccgcacgaagacaagctctggtagtgaaaggaaaaaagttatggctaatatgaaaaggcttcagcgcgattacggcgatgttatctggacaggcaaaaagtgcattatgggtatgcctatttcttttacaagatacatacttacgtcaagtgtgctttatacgaaggtcggatttctgaatatcaaggaagatgaaatagagctgtacaagatagttgataaaaccatgaagctgtcgatcggtcagagaatggttggttgcggtactatcgtggtcacatcaagggactgcgacactccgaacaaggagcttgtatctgtcaaaaatccgagagaggtaaagaaaatacttgacgaggcggtaaagcttgagcgcgacaagtatatggtaagaggcagagatatggtcggcgcaaacctgcatgaacacggcgatatgggtgaaactaatctgcatagcgaagattttgacgaaatggcggatatgtaa

SEQ ID NO: 595 - DNA, 117 bp, Eubacterium siraeum
  misc_feature: SEQ ID N?1463106
agggaaaccttggacgtcaggcagtcaatagaggacaagcattactacttcaaaaaacgccgctttgacgttgatgattatctcgccgatgacgaaatagactggagcaatatatga

SEQ ID NO: 596 - DNA, 876 bp, Desulfitobacterium hafniense
  misc_feature: SEQ ID N?1463747
atggaagaagcggattacagcaaatttgttcccaatgtacattttgagcagataccaataaagaacctagttgcaaatcaggaatatcagcgtaatttatcgcaaaatcacattgtgagagcggcaaaaaattttgacctgtatcagataaatcccgtgaaagtcagcaggagaaacggcataaattatgtatttaacggacagcacaccattgaaatagttgccatggtatcggagtccagagatacgcccgtgtggtgtatggtttatgatgatatggattatagcgttgaagcggacgttttcgccaatcaacagaaatatgtaaaagcgctggcgccgtatgaaatatacaaggcaaatattgaagcaggcaatgataaacagattatgataaaatcattggtggagtcatacggcttaacaataggacgcacaaagggacaaggggttatatgtgcagtatcatctttggaatatattttcgatacttggggatttcacgttcttgaccgtgctttgcgattatgtataggcacttgggagggtgcggcaaattcgctttcttcaaatatgctgaaaggtattgcacgacttattgtggcatttgacgagaaaatgcgcgatgatatattcaaggaaaaggtcggagcttattccgcaaaggatattatccgcacggcaaaggaacgtcgtgcaggtgcaataggatatgccgaggcaatgcttattgcgtacaacaagaaaatgaaatatcctctcagatggagcaatctttacagcaatcccaaagtcaaaaaagctgtagaagctattgaaatggatattatgagtacggatgaagaagcggacgatatgctgacattttttttatga

SEQ ID NO: 597 - DNA, 375 bp, Bacteroides pectinophilus
  misc_feature: SEQ ID N?1463748
atgcaggacacaacttgtgataagcctattgctgtaattgattttgctaataatcgtatacgaatacataaaaagacgatactttcgcttggttctcccgaaagcattctgcttctcataaatcctgaaaagctgacgctcggaataatgggttgcgctaatgatatgcaaggctcacatcgtattcgtttgcacccaaagcattgctatgagctttacagcaaatcgcttgttatggcgatgaaaaaggctttctcctattgggacggagaaaaaagctatcgtctgacaggcgattatataaacactgaaggaattgcttgttttaatttatccgagtcagttccgataaaaccggatgaggttgacttgtaa

SEQ ID NO: 598 - DNA, 843 bp, Eubacterium siraeum
  misc_feature: SEQ ID N?1464344
atgcaggacaaacgacaaatcaacatagatgtttttgatgatacaatggaacagtataagagcaatgccgtacttaaggcggctgtgagcaattctatcgcaaaccagaaatttacgggagcgaatgaagcggtggatttgccgcagtcgaaaggatattcaccgacagttacagtaagcggtaaacgttcgcttgaagcggctgttgaatacgcaaagcaaggtatgaagacctgtgtactgaactttgcttcggcaagtaacccgggcggcggtgtaacacacggttcttcggctcaggaggaagctatctgccgttgttcaacgctatatccttgtcttaattcaggcgatatatggggttgcttttacactccgcacagagccgcaagaaatccgctgtacaatgacgactgtatctatacgcccgatgtatatgttattaagagcgatacaagtgtaccgaagctgttacccgaaagcgaatggcagaaggtgaacattatcacctgtgccgctcccaatctgcgtccgaagccgagcaacagtatgaacccgggagcaggcgataagcaagcgaaagtgaccgatgaagagcttgcggagctactttgctcaaggatacgcaggatatttgaaattgcggcggcaaacgataacgaagcgctgatactcggcgctttcggctgtggtgcgtttatgaacccgccgggcgttgtagcaaaggtgtttgcggagcagttaaaggcattcggaagttattttaaggcgatagaatttgcggtattccataccgagcgcgaagcgcaaaattacgacgctttcaaggcagttataaaatag

SEQ ID NO: 599 - DNA, 216 bp, Unknown
  BMI gene
  misc_feature: SEQ ID N?1464542
gaggaacgggggcttctgatcggcgatcctcaacatacgggcgacctggcgcacgtgccgtcgtgcagtgaagtgttttttttttgcggcaggtggtatatttcctttgcaacgcgcctgccgggcaacgagcagtatctggagctgatggattttttctggaacgaagacggtactgtttccgtgggcgaaaaggtcgtacggcctgtcaaataa

SEQ ID NO: 600 - DNA, 648 bp, Unknown
  BMI gene
  misc_feature: SEQ ID N?1465173
acggatacttatatcgaaaaggatctcgccatcaacgacgagatcgacaaactgcgtcattccgcaacctgttcgctggcggagcggagagacgtcatcgtggtcgcctccgtttcctgcatttacgggctgggcgcgccggaggaatattaccgcctggcggtctccatccggccgggcatggagatgagccccaacgaactgatgcggaagctggtttccatccagtacgcgcggaaagacgtggattttacccgttcttccttccgcgtaaggggagatacggtggatatttttccgtccggaaataccgagatcgtactgagggtggaatttttcggggacgaagtggagcgcgtctgcgaggcggagttcgtcacgggaaaggtcatatccgagttaaagcacgccgtcgtgttccccgccagccactatgcggtggagagcgaaaagctgaagaacagcctggtcgccatcgaggaggatctgaacggagaagtcgccgcctttcaggcagaagggaaactgctggaagcgcagcggctgaatcagcggacgcgctacgatatcgagatgatgcgcgagatcggctactgcaagggcgtggagaactattcccgttacttcgacggcagaagcccgggcgag

SEQ ID NO: 601 - DNA, 567 bp, Unknown
  BMI gene
  misc_feature: SEQ ID N?1465346
tcctcctgcaccgtaaagattgcggacgagggcgcatttctcgccgaggtcggcacgcttatcgaaaaatcctacgaggtcaacgaaatctttttcggcaaggggctcgaattcggggacgaaggcaaaacgcccgatgagattctcgccgagtgcaagaccgaggaagagaagatctacctctatctccccgtaaaggaaagcgcaaaatacaagacccgcgaggagataatgaaccttgcgcacgcggtgtattccgcatcgtactgcgaatatctcgaggcgcgcggcttcgagggaatctccgacggagacgctgtcgcaaattacgcacgctatatcgaggccctcacctaccgtctcaccgtcaacgtgaaatccgccgctgaggccatgaagctcgaccgcacctacgatatctcgactcttgcgatctcccgcaagggcagagacttcgtcgccgtgaccgtcgatgcatacgaaaacggagagtttgccgagaaaaagaccttcaaggtaaagcttgaggactccggcgaatggagactcgattggcccacatactga

SEQ ID NO: 602 - DNA, 525 bp, Eubacterium siraeum
  misc_feature: SEQ ID N?1465360
atgagagagcttgaaacaaagcgactgttgctcagaaagctgaggaaaaatgacgcagagagtattttcggaaattgggcgagcgacagcgaggtcgcaaaatatgttacatggaatgcgcataaggatataaacgaaaccaaggcaattcttgatatgtggctggcggaatatgatagtgatagctgttaccgttacggcattgagaataaggcagacggtgagcttataggaatgatagatgtagtcggttatcatcacggaaatcccgtgataggatattgctcctgccgcagatattggggcaatgggtttatgaccgaggcgctgggtgctgttatgaaagagcttgcggaggacggatttgacacatttgtcattgaggcggcggaggacaatgttgcaagcaacagggttattgtgaagaacggatttcagcttgtggggaagagagaggacaggctgtcggaaataaagccgcaggtcgttacgataaattcgtataggtattatgttgaaaaatag

SEQ ID NO: 603 - DNA, 249 bp, Unknown
  BMI gene
  misc_feature: SEQ ID N?1465670
atgattaagtcaaacggaaacatcaacgaagtcaaagaaaagatccgcgccttttacgaaaaggacgtggacgtcacggtcaatctgggccgtaacaaattcgcccggttcagcggaaagctgaccggggtatatcccgccctgtttaccgtcagcccgttcgataagagcttcaaggggaagacctcttactcttattcggagtatctgtgcggcaacgtcgtgatcaaggagcggaacggagaatga

SEQ ID NO: 604 - DNA, 165 bp, Unknown
  BMI gene
  misc_feature: SEQ ID N?1465954
atgacaatagaatatgggcctgtggcgaaattggtagacgcactagacttaggatctagcgcctttggtgtgagagttcgagtctctccgggcccaccatttaatcaagaggcttatttaaggcctctttttgacttttttgccactttaccaaataaaagttga

SEQ ID NO: 605 - DNA, 762 bp, Unknown
  BMI gene
  misc_feature: SEQ ID N?1466726
ttcgatgaaatcgatgctgctcccgaagaaaaagcaagaggtattactatctctactgctcacgtagaatacgaaacagcagacagacactatgctcacgttgactgccccggccacgctgactatgttaaaaacatgatcactggtgcagctcaaatggacggcggtatcctcgttatcgcggctacagatggtcctatgcctcaaacaagagaacacattctgttagcaagacaggttggtgtacctaaattggttgtattcttgaacaaatgcgatatggttgacgatgaagaacttctcgaactcgttgaaatggaaacaagagaattgctttcttcttacgaattcgatggcgacaacatccctgttatcaaaggttctgctttgaaagcattggaagctgttcaagctaaccctaacgtaaaaagaggcgaagacaaatgggttgacaaaatttgggaactcatggatgcagttgactcttacatcccgactcctgaacgtgacttagacaaacctttcttgatgcctgttgaagacgtgtgttctatcacaggtcgtggtactgttgctacaggccgtgttgaaagaggtaaagttaaagttggtcaagaagttgaattggttggcttcggcgaaactaagaaaactacagttacaggtgttgaaatgttcagaaaactgttagacgaaggtcttgcaggcgacaacatcggggcattgcttcgtggtgttgacaaaactgaaatccaacgtggt

SEQ ID NO: 606 - DNA, 588 bp, Unknown
  BMI gene
  misc_feature: SEQ ID N?1468715
aactcatactccgatgcggtgttaaacgcagatagtgttggtggtattatcggtcagctgacatccagttatggaagtcacaatgtgacaattaacaatacttactcaacatcttctataactgcaacaagcgactcaggatcatttattggggaaatcaattctacaaataacctaacaataaacaattcctttacagacactaatataagtcctgtaggttcagatgtaaatggtactaattctcctggtggcataaccgttttggatgcaaataaatggcaagatcctttaacatttacatctgctggctggtcaacagatatctgggatttctccggagatactccaacattaaaaaatgtcggcctggttaaagaaaatgtaagcacaaaagcattggaaaaaccaatcagcgtaacagcccaagaaggtgcaacaagcaactttgaaagtcttgtcggattcaaaacaatcactctgaccggcggagtaacaggccttacaagagatacagcaggtttaactgcaggttcatttacaattgcccaagatggcgccaatgcgtttacttttgaagtaaaatca

SEQ ID NO: 607 - DNA, 639 bp, Unknown
  BMI gene
  misc_feature: SEQ ID N?1469426
atgacactaggtgtaataggtaaaaaattgggaatgactcaaatctttgatgaacaaggattagctatacccgtaactgtaatcaaagtagatccgattgttgttactcaggtaaaaactgttgaaaaagacggttataacgcaattcaagtaggtacaatcgcagctaaagaaaaacacttaactaaagctgaaatcggtcactttaagaaaaataacttggaaaatttcagacaccttcaagaattcagaattgacaacccgcaagactataaagtaggcgacaaaatcgaattatcagttctagataacgtagaaaaagttgacgtttgcggaaaatcaatcggtaaaggtttccaaggtaccgtaaaaagatggaacttctcaagaggacctatgggtcacggttcaaaaaaccacagagaacccggttcaatcggtgcaggtacaactccaagccgtgttatcaaaggcaaaagaatggctggtaacatgggtaacgaaagagttactattactaaattgaaattagttaaagttgatgcagctaacagcttagtattagtaaaaggttcagtacctggatgcgaaggcagattggtaacaatcgttccaacaagaactaaatggaatggctaa

SEQ ID NO: 608 - DNA, 651 bp, Bacteroides capillosus
  misc_feature: SEQ ID N?1469532
ttggacgatatcccccgcctgcacaccgcgcaagccaactggcagcgcactgccgatgaataccggcaaaagcagcagcaggccgatgccgcccagcattccagcgccgagatgcagcgcgccctgaatgccgcccgcgccgggattctggcgcaagatctggtggatggcaccccctgcccggtgtgcggtgctctgcaccacccagcaccggcagcccccgcccccagccatgtcaccgaagccgcctgcaacaaagctgcgcaggcagcggcgagcgctgcggcggaagcttccaaagcctccaccgcagccggggaagccaaagccgcagcccaaacccagcgggataccctgtatgcgcgtaccgccgcctttctggcgcgccgccagcattataccgggccgcaggccgatgccctgaccccggacgagctgcaaaccgccctgcaggcccaacatgacagcctgcgccgcggccttgccgaagtgcatgaccgcatggcaaatgctgaatcccgcaaaaaagatctggaaaagctgacccgccaaaaagcccagctgcaagcccagcgccccgaccaggcaaacgctgtggagcaggcccgcatcgcacaggccaacgccgaaaaagccgccgcggaagcccag

SEQ ID NO: 609 - DNA, 1083 bp, Unknown
  BMI gene
  misc_feature: SEQ ID N?1470497
atgaaagatatgttagacaaaattctccagattgagaaaaaatataatgaattgggtgtcacattatcagaccctgccgtaattcaggattacaacaagtttagagacctttctaagcagagaaagtctatggaagaaactgttaatctgtattatgaatggaaaaaagctgttgatgctatagatgaagctaaagaattaatccgtgcggaatctgatgatgaaatgaaagcgtttttgaaagccgaaatggaagaaaatgaagcaaaacttccggaattcgaagaaaagatgaaagttcttttattgccccgtgaccctatggatgataaagatattatgcttgaaatcagaggcggtgcaggaggcgatgaagcgaatatttttgcaggcgaccttgcaagaatgtatatgagatatgctgacaaacaaggctggcagacacaagttttgagtaaaacagaatgtgaagcgggcggtgtttccgaaataattatttcaatgaaaggcgacagcatatattctaagttgaaatatgaatcaggagttcaccgtgtacagcgtgttccagctacagaatcacagggacgtgtacatacatcaaccgcaacagttgcagttatgcctgaagttgatgacgttgaagttgaacttaatatgaatgatgttgaaatttcaactgctcgttccggcggagctggcggacagaacgtaaacaaggttgaaactgctgcaagagttttccataaacctacaggaattatgattttctgtactgaagaacgttctcaattgcagaacaaagaacgtgctttgcaaatccttaaagcaaaactttatgatatggaagtgcaaaaacagatgcaggaaattacagacttaagacgttctcaagtcggaacaggcgacagaagtgaacgcatcagaacttataatttcccgcaaggtcgtttaacagaccacagaattaaccataatttaaatgtgaacactgttattgacggtgatttggacgagcttatcggtttgttaatggaacacgaccagaaattgaagttggaaaaactggctgaggtgaattag

SEQ ID NO: 610 - DNA, 477 bp, Unknown
  BMI gene
  misc_feature: SEQ ID N?1472235
atggaaattaacgcaactatattagtatcagcaatcagttttatcgtattcatttttataatgaacaaaattttgtacaaacccgtgcttgaaatcatggaaaaaagacaaaattatattgacgcaaataaaaatgaagctgatgaacatcataaaaaagcacaacaacttctggtagacaaagacgccagagtcgctgaagcacaaagaacttcgcgtgatatagttgcgtcaaaagccgatgcaatcaaagaagaaaaatctaaagtactaaatgacacaaaaaacagtgtcaccagctactttagcgaacaaaaacaaaaccttgctcaccagaaggatgaagctgcagctaatatgaaacacgatgttgcagatcttgcaaaccgtctcaccacaaaacttatgggagaaggcattgcattcgaacctgtaggtgaacaggaagtggaagaggtaatgaagaaaaatgcttga

SEQ ID NO: 611 - DNA, 2328 bp, Clostridium cellulolyticum
  misc_feature: SEQ ID N?1473577
tacagcttaaaaaattggactatttcggtttctgcaaatgactctgcaacgtcaactggtgtatttgaatcattaaaagatgcagaagtaagaaatcttactattgaaaactttaaaataaccggtgcagatcgcacaggtagtcttgctgcttctgcatctggttcattaatagaaaatgttaaggttactcaatcctctgtaatatctaataatttagtttctactgtcgataattatataggtggtttggtcggatatgcaagcagtacttctttttcacagatagctatagaccaaacagatgttggtggcggttcaaaatgttcaacaggcggcatcgttggttggtacactgttagcggctccgaaggcattactgattcttatattgatgctacatctaatgtctcaggtacatatcaggttggtggattagcagggtatgtttcaggagcaacaatttctacttcatattcattggcaactgtaaacggaccaacttcaggttcaattatcggaaaatctaactatgcaaaattgaaaaatgtatattataaaggaactgatgttggttcaggcaatacaagtagatcctcatgtaccagtgtaagctcagaaactgagttgcaaaatgcagttgatcttgataaggcattttcagatgatgtttggaataatgctggtttgttgctaggacatgcaacccagattagtgatggaacaattaaaatcaataatgtcgaaataaatctccgaaatgatattacttgggctgttaattttataaataacatgaaatcgcaaaccggtgtggttgcaagtatagaaaataacagagttgttcttaaaaatgttgacggaagtacaaacaatattgtcttagaaaaaggcacaagcgatttctttgacgttgcaggtatatctgtgacacaaggaaccagccgtgcagcatcacaggagccaataacagtaactgttgaaaataccaaggaaataaaagatacatctcatttaacagaagcagaagctattgcgcaagggtatactgtaattaaaaccgcacaagacttacaaaatatatccaacaacctttctggcaaatatatgttgatgggtgacattgatctgtcttcacttggtacattgagcagttctctcataagtgacacatttaaaggtacatttgatggcaacggctatacgatttctggcttgaatattgactctacaagtgaaactgtcggcttattcaaacagttggattatgctacagttaaaaatctctatatagaaaacagctcaattaaaggcaatggtcaagttggcgcagtggctggtttcagcgctggatcatacatttcaaaggtatctgttaatgctgatgtaacagcatcaagcagcagtgccggcggtataataggcagtgcttttgaaagcaccatagatcaggtacaagtttcaggaaatgttgtttctaatggtacatcctcatatgtaggcggcgtagtcgggtatatgtatgctgatgattacagcggctccaatcctacaatatcaaatgcatatgtaaatgcaactgtaagaggtcaaaccgttggcggtatagttggttcaattgtaagagttaccatctccaatgtatttttcgaaggtcaaactaattcatataaaactgccggtgctattgttggttcaatacatgctaatggtactgcagattcaagaatagaatatgctttttggaatacagatataaccggtaaccataatgcctatggcgtagatattagtaacagtacatttatagatgaccatacatacggaatcacccctgatgtttatgcaaatgaactctcttactgggaatctactggcatttgggatatatcaggctcctcaccacaaattaaatcattgaaccctgaaactaaatacaccttaacaggtgcaacaatgcccggcttgacagctgacagtgtattgtcgggttatgaaaacaataacatttacttcaacggtgcagaaggtatgggtgcaggcataactgccgaatcaactgatactgttgcagatatattgaataaacttaaaacaaaaatagaagcggccggtcattcatttgaatggagtatttcaaatggagcaattaccgttacatcagatgtaaactttaacttctcggggcctgataacagtatagctgttgcaatgggattacaaagcggtacaatcaccggtacaggctcgtctggcgatacctctgccccggaagcttcatcagacccgatatctttcacatcaaacggtacaggtacacttgatcag

SEQ ID NO: 612 - DNA, 1164 bp, Unknown
  BMI gene
  misc_feature: SEQ ID N?1479330
atgaaaatagatgaaaaaggaatagttctttcaaccttaaacgatattttagacgcttatgaattgcaactgcaaagcaaatacggcgctgatttttatataaaacccgagggcgtaattgacaatattgcccagtcatcaggctttatggagatgtccttgcaggaacagattgcctttttaggaaaacaatttgaccctgaaacagcagaaggagtctggcaggacaagctttatgaaagaataaacctctacagattggaagcccagtccacagtattcaccaaaggtgtaatcggcacaccgggttttagtgcggaagcaggctctgttactatccgtttagaggcgtcgggtgatgaatttgttaacagtgagacctttaccatagaggactcgggtacggcaaatatccggtttgagtgcgtaatcacaggtgtgattcctgtgaatgctgctgatacttttcaaatagttgaagcaccaaacgaaatcacagcaatatctcaagaagatgcaacagacatagccacaggcagagaaagagagtctgatgacgaattcaggatacgttatcgaacagcaaaagcaataaacgcaaaggcaacaagaaatgccaatattgcaaacctttccaaatatgttgataacatagcatttttaaagattttcgacaaaaaaacagattacacaatggaagccggtacgctgcttgttatagcaaagcacaatacaacggatgcagcttttgcaaatgcagtttttgaaagcgtaacagacggaattgacttgttaggcgatgacacacaggtggtcaaagacagagcggggcaggacgtaacgataaactggaaaaacgctgacgaaatccaaattgatataacaggaacaatcaaagtgcgtgacggatattaccccaacacagtaatagcgaatgcaaaacaaagtatattagcttatatagaaaaacgtgtgttcgggctggaatcgataatttatgcaacggaatttattattcctgtgctccaaaccgacggagtagaggcagttatcggcattcagataaaaaaacatgatgaccaggagtacacagacaacgtaagcttgacccgtgaagaggttccggagtttgctttggagcgtataagtttaacagagcaatag

SEQ ID NO: 613 - DNA, 366 bp, Unknown
  BMI gene
  misc_feature: SEQ ID N?1479339
gtgggaaaaacactggcaggaggttggatttatggattacagagttgttgtattccattgtatgaggcaaaatctcggaaatttttcgagtttgtccgctctgttaccggacgggtggacggacaaaatgaaacagcaaatagaaaagaaattatcaattctgtttacaaacttaagcgaacaaatacaaaaataaaagctgattccgtaaaaaacacaatgaatctttttatggcaaacaaacagctcggttttggtgtaaacctcgaagagttaaagcgtatgacaccgcaggaagcgtatttgttcggacaacaggttgcagaagcactgcgccaattggaaattgaaagattagcaagataa

SEQ ID NO: 614 - DNA, 1140 bp, Unknown
  BMI gene
  misc_feature: SEQ ID N?1479340
atgagcgtttatgacaacttaatcagcattttgttcaaactgccggacggcagatcgttgaacgaatactacaaaaacgttttgctggtcggcaagattacagaggacgacttacaaactgacgtggaattcccgtcagggggggtgggcaagtattcttcttatgacgaagttattgccgtgttcaaaccgacatcgcagtttgctatcgaagcaaatgccgtttttaaccaaaaaagcaattcacaaaccacatcgcagattcaatatctgatgattgcaaaacaggatgactccggaaccctcgctgacgcgctcaacagagcaaaagtagcggacggcagatttgcaaaggttgttcctgtttctcgtgtggcagctgatttaaaagcggttgctgactggtgcttgacgaataaaagattctgcgacctgcctgttaccgatgttgacgacgtggccgaaattgtcgcgggcgaaaacgattacgcttacggcgtgttttcaaaatccgcaacaaacccgattgcttcggctgttgcttctacgtctacctgcggatatttcggaggcaaagacggttctgcacagtttacacagctgaccgggatattacctgaggtttatacaggtgaagaaatctctgaaatgaacacaaacaatgttgcttattacacaaacgtttcacccatagacggcgggcaaacagaggggttcgggtataactgggttataggttcgagaatgctcggcggtgagttgagacagaggcagatgatcaaggattatatcgaaaaagatatggggcttatggctcttgagttctttaatcaaaagcccgtttatgacgagaccggaaacaacttgcttttgacaatggctcaaaaacgtttcagaagctatcagacgtacaatcttgtaattgagacaaacaacgagcagacagggtttgaactaaaggttattcctatcagaacaggcgctgacagcattatgaacaccgatgttgaagcttataacgctaaaaagtttaagcttcaaggttattactatgatgctattgtcggggagaaggtggatttcttgttctacgtagacccgtcagacgaacaggtggagcagatacttggcgatgattag

SEQ ID NO: 615 - DNA, 537 bp, Unknown
  BMI gene
  misc_feature: SEQ ID N?1485035
atgagccagtatggcggtcctgacggcgaaatcggagcctctatgcgctacctgtcccagcggtatacgatgccttataagatgcagaaaggacttctgaccgacatcggaaccgaggaactcgcccatatggagatgattgcagccattgtccagcagatgacgcgcaaccttactccggcacagatcgagtcatccgggttcggaccatactatattgaccacaccacggcaatctggccgcaggcagcaggcggaatcccgttcaatgcgtgcgagttccagtcgaagggcgatgcgatcacggatttatatgaggatatggcaggagcgcagaaagcccgcacaacctacgacaatattctccgcgtggtcaaagatccggaagtatgcgatccgatccgttttctgcgcgagcgggagattgtacattttcagcggtttggtgaagctttaagaaatgtacaggatcacctgagcagtcgtaatttctatacgtttaacccagagtttgataaagtgaaagcgaagggataa

SEQ ID NO: 616 - DNA, 774 bp, Unknown
  BMI gene
  misc_feature: SEQ ID N?1485901
atgctgggattgccgcaagggaaggagggaaaacccatgatgaccgtaagtgaagtaagccgcctgaccggcgtgagtatacgcaccctgcaatattacgataaaatcggcttgctgcacccaaacgggcacaccgaagcgggctaccgcctgtatgacgatacagcgctggcagctttgcagcagatcctgctgttccgggagatggaattccccttaaaagatatcaggcagatcatgacccagccggggtttgaccgccaaaaggcgctgacacagcaaatggaactgctgatgctgaaaaagcagcgcctggaaaacctgatcgaccttgcccgcaggatgcagcagacaggaggaaagccaatggattttaccgcatttgataccacaaaactggaagaatacgcccaccaggcaaaacaggcgtggggtacaactccggagtaccaggaatttgagggaaaaagcgccaaacgtaccccacaagaaagcaatacaatcaacgcccagttgatggccattgtggcggcgtttggtaccctgcaaacccgcccagcccaggacccggcggtgcaggcacaggtgaaaacactgaaggatttcatcacccggcactattacacctgcaataagcagattctggcccagctggggcagatgtacgcggcgggcggtgagtttaccaaaaatatcaacgccgcaggcggccccggtgcggcagaatttgccgccagggcgattgaatattattgcaggggagaagaaacatag

SEQ ID NO: 617 - DNA, 522 bp, Unknown
  BMI gene
  misc_feature: SEQ ID N?1493861
accgcctttggaggacagtggagatctgatgccaacggctggtggtaccaaaacgaggatggaagctatccagcagacgcctggcagtggatcgacggaaacagtgatggagcagccgaatgttacttcttcgacagccagggatactgtatgacgaatactgtaacccccgacggcagcacggtgaacgagtatggagcctggaccataaatggcacggtccaggtgaaggctttccccagggaatccggagccacagatgggatccggtccgaatttaaaaaggcgctggatacatatgagcagtttttcgacgagtactgcgccttcatgaacaggtactccaattccggttacagccccgaaatgatgggagactatctcaccttcctctcaaagttccaggaagccatggatagccttaaccgactggataaccaggaattaaataactcagagcttctgtattatctggaggtcactgagcgcatcacccagaaactgacggaagtttccctgtaa

SEQ ID NO: 618 - DNA, 2091 bp, Unknown
  BMI gene
  misc_feature: SEQ ID N?1504786
atggcaagaaaaactccattagaaaaaatcagaaacattggtattgccgctcacatcgatgccggtaaaaccactacaactgaacgtattttgttttacacaggtaaaactcataaaatcggagaagttcatgatggtgctgctgtaacagacttcatggaacaagaacgtgaaagaggtattacaattcaatcagctgctgttactgctgaatggaaaggtcaccaaattaacattatcgacaccccgggccacgttgactttacaatcgaagttgaaagatctttacgtgtattagacggtgttgttgctgtattctgtgcagtaggcggtgttcaatctcaatcagaaacagtttggagacaagctaacagatatgaagtacctcgtatggtattcgttaacaaaatggatagaacaggtgctgatttttatagagtagttgaccaaattaaaacaagattaggtgcaaatgctgttcctattcaattgcctatcggtgctgaagataaatttacaggtttgattgaccttatgacaatgaaggctgaaatttatacaaacgatttaggtactgatatcagagaagaagacgttcccactgatatggcagaaaaggctaaaaaatacagagatgctatggttgaagctatcgcttctgaagatgatgcattgatggaaaaatattttgatgatcctgattcaatcacagttgatgaattgaaagcagtattgagaagatcagtttgcgaaaacaaaatcgttcctgtaacttgcggtacagctttcaaaaacaaaggtgttcaattattgttaaatgccgttgttgattatatgccatcacctgttgatgtaaaagctattgaaggtgaattggaagacggtacaaaaactgaaagacattcttcagattcagaaccattctcagctttggcatttaaagttatgactgacccttatgtaggtcgtttgactttcttaagagtttattcaggtgtaatcactgcaggttcttatgttctaaatgctactaacggcaaaaaagaacgtattgcaagattggttcgtatgtatgctgatcaacgtattgaagaacaagaagtttacgcaggtgatatctgtgcagcagttggtttgaaagatacaacaacaggtgatacattatgtgatgaaaaagctccaatcattttggaaagaatgactttccctgatcctgtaatttctgttgctatcgaaccaaaaacaaaagctgaccaagataagatgggtattgctcttcaaaaacttgcagaagaagatccttctttccgtgttaaatcagatacagaaacaggtcagacaattatttcaggtatgggtgaacttcaccttgatatcattgttgaccgtatgttaagagaattcaaagtagaagctaacatcggtaaacctcaagttgcatacagagaaacaatcagaggtacagcagatcaagattctaaattcatccgtcagtcaggtggtaaaggtcaatatggccatgttaaagttagaatttctccagctgaagaaaatgccggatttgtatttgaaaacaaaatcgttggtggtgctattcctaaagaatacattgaacctgcaagaaaaggtatggaagaagctttagaaggcggtatcttagcaggattcccaatgattgacgttaaagttgaactttatgatggatcttaccacgaagttgactcttctgaaatggcattcaaaattgctggttctatggctattaaagatggttgtagaaaagctcaaccttgtattttggaacctatgatgaaggttgaaatcgaaattcctgatgaatttacaggtacaatcatcggtgatatttcaagaagaagaggtcgtgttgaaggtcaagaacctgttggtacaacaggaaatgttatcgtaagagctttagttcctcttgctaacatgttcggttatgctactgatttgagatcaaatactcaaggccgtggtactttctcaatggaattcaaccattatgaacaagtacctgctaatattgaaaaagaaatcatcgaaaaatcaggtgcaagcaaagcataa

SEQ ID NO: 619 - DNA, 804 bp, Unknown
  BMI gene
  misc_feature: SEQ ID N?1527181
ttgttctccaccgaggagagccgtgccgatgcgcatagagaaaaagtgatggaaattcctctatctgagttacactcgttcaaggggcatcccttcaaagtcaaggacgatgaagctatgatggagaccgcagagagtgtcagacagtacggtgtgctggttccggcgattgcccgcccagaccctgacggcggatatgaactggtagccggacacaggcggcacagggccagtgagttggcagaaaaagaaaccatgccggtgattgttcgggatttggacaatgatgctgccacgattatcatggttgacagcaatttgcagagagaagaactacttcccagcgagagggcatttgcttacaaaatgaagctggaggctatgaaacatcagggcgagcgtatggatttaacttgtgcccaagttgggcacaagtcagatggaaagaaatcgcgagatattttggcggaacaggttggtcagagtaagaaccaaattcagcgctatatccgtctgacagaactgattcccgaactgctggatatggtcgatgaaaagaaaatcgcctttaacccggcttatgagctgtcatttctcaaaccggaggaacagaaaatgttactggacgcaatggattatgagcaggcaaccccttccctttcccaagcccagcggctcaagaaattcagtcaggatgggaaactttcagaagatgtgatgctcgccattatgtcggaggaaaagaaaggcgaactggataaggtaacgcttacctcagacactctgcggaagtatttccccaaa

SEQ ID NO: 620 - DNA, 735 bp, Faecalibacterium prausnitzii
  misc_feature: SEQ ID N?1552172
gtccacgcccgcatcgacgcattggctgagaagctggccgagatggagaagcgccggggcgagagccggaaggcccgcgccaagaccgggatgccggtggtcagtctggtgggctacaccaaagtgggcaaatccagcctgatgaacgccctgtgcggccccagcgtcgccgaggccgacatgctgttcgccacactggaccccaccagccggaaactggtgctccccagcggcatggcggtactgctggtggttacggtcggcttcgtctcccgcctgccccacaacctagtcgaggcgttcaaatccacgctggaagaagccgcctggtcggacgtcatcgtccgggtagccgatgcaggcgacgaacagcgcgaagagcagctggccgtcaccgacgaagttctggacgggctggactgcgccgacatcccccgcctgaccgtctacaacaagtgcgacaagcccggtgccctgtcctttgacccggatatcctgctgaccagcgccaagaccggctatggtctggacaagctgctgcaaaagctggatgagaccctcagcgaccgggtccacaccctcaaggtcctgctcccctacgacaagctcggcctcgccgcccccatgcgggagcgcggcagcgtgcaggtggaggagtaccgggaagacggcctttatctggaaggcatcgtcaagaccgaagacctccactgcttcgaagggtatctcgtctga

SEQ ID NO: 621 - DNA, 747 bp, Faecalibacterium prausnitzii
  misc_feature: SEQ ID N?1554681
atgctcaaacaaagtcagatcgacctctgcgggcgggtggattttacccgcgaagtgccactgctggggcgggacgaggcgttttcgtttgcctgcgcgggctgcggggattgctgccgggggcgggaggacatcgtgctgtccggattcgatctgtggcggatcgcggcgcggctgcggctgccgacgcggacggtggcgcgggcgttctgcaaggcgtccatcgggcaggtgagccgtctgccggtgctgcggctggccccggtgcgggaggaggggaacaactgccccttcctgaccgaagaccactgcgccatccatgaggcggaaccgctggtctgtgcgctctatccgctggcgcaggagatcaccagggaaggggaggtcggctactttttgcagtccacccgctgcggcgggcaggtgtttgaagcaagggtgggggactatctggcccggtacgatgtcccggcgcgggaggcgacggatgtacgctgggcgcagacctgccttgcgttggaagaccgggtggaggcgctggaagcgctctttgaaccggtcttcctccggcggatgcagcagaaattgtggcaggcgctctattatcaatatgagatcacgcagccgttcctgccgcaactggagaaaaatctcgtctggctggaggcggaactcgaaaagctgtccgcgctgcaacggcgcaggaacgcgcgttttgatgaatccatcgaaaaaatcgaacgataa

SEQ ID NO: 622 - DNA, 309 bp, Faecalibacterium prausnitzii
  misc_feature: SEQ ID N?1554904
aacacccccgatgcgctggctgcggtgtttgatctggtcaaggagatcaacactctgtccgcttcgtccaccaaagaagcgcttgaagctgccgccaaggcgttcgacgagatcaccgacgtgctgggcctgatgtacaaccgcaggaaggacgaggtgcccgccgaagtgaccgagctggtcgaaaagcgtgctgcggccaagaaagccaaggactgggccaccgccgatgccatccgcgcccagctgaccgagatgggatgggccgttaagcataccgcccagggcccccagctgagcaagatgtaa

SEQ ID NO: 623 - DNA, 1428 bp, Unknown
  BMI gene
  misc_feature: SEQ ID N?1555087
atgcgatctcgttttcgtctgctcgtcagtctggtgctgagcgctgcgctgctgctgggctgtgtgggctgcggcggcagtgccaaggcacccaccaccatcacggtgtggaactattacagcggcgacctgctgagcagcttcaacgctctggtgaaccagttcaacgccaccgtcggcaaagagaagaacatcgtggtcgagagcttcaatcagggcagcgtgaccgacctggaagcgaacgttctggccgctgcgcagggcaaggtgggcgctgcggccctgcccaacctctactccggctatgccgacatggcctacgacctcgacctgctgggcgaggtcgtggacctggccccctatctgaccgcaaaggaaaaggccgcctatatagacggttttctggccgagggcgacctgatgaacaacggggagctcaaggtctttcccatagcaaaatccaccgagctgctctacctgaacgccaccgactgggcctcctttgctgcggccaccggtgtaacctacgacgacctggccaccatggaaggtgtcgtggaggtggcccgccaatactacgactggacggatgccatgaccagcacccccaacgacggcaaggccttcttcggccgcgatgcgctggccaactacctgctgtgcggtgctcaggagatgggcctgaccatctttgatgccgagaacggcgtcatgaccctgcattttgacaaagacgtcatccgcaaactgtgggataacttctatgtgccctacatcaagggctggttcggtgccagcggcaagttccgcagcgacgacgtgaagaccggcaatctgctggcctacgtcggctcgtcggccagcagccccttcttccccgcccaggtgatgaccaacgacaccgagagccacgccatcgaaccggccatcctaccctgcccatcctttgcgggctgcgccccggtcgccgcccagcagggtgccggcatgatcgtgaccaaaggcaccgacgcccagatccgggcctgcgttgaatttctgaagtggttcacccagccggaaaacaacatcgcgttctccgtgaactccggctatctgcccgtgacccacgccgccgcaagcccggacgccattcaggccagcggactggagctgaccgacaccatcacccaggtgctggatctctcgctggatgccgtagagcatgacgccctgtacacgacccacgccttcccggagggttccacggcccgcttcaccctgcaaaatgccatgaccgatgcggcggaggccgaccgggccatcgtgaaagagcggctcgccgccgggcagacgcccgaagaagccgaatccgaatttctgaccgacgaatactttgaccagtggtacgaatccacgaaggccgcgctggaagcctacgccggctga

SEQ ID NO: 624 - DNA, 1092 bp, Faecalibacterium prausnitzii
  misc_feature: SEQ ID N?1555245
atgaagaaatcgcttcgtttcgccagtgcggcgctggcgctgactctcgccgccagcatggcgatgcctgcctttgccgcaggcaagtccgattttgccaagtctgagaacgtctacgccgtcatgaacgccgatggctccatcaagagcaccagcgtcagcgaacatctgtacaacgccaacggcctgtccggtgtgaccgatgtttcttccctgaccgacatccagaacaccgagagcgatgccgcctttacccaggacggcgaaaagctggtctggaacaccgacgacaccgacgtctattataaagggaccaccgaccgtgacctgcccatctcggccaaagtcacctacacgctggacggcgtgaccgacagcctggagaacctgatgggaaagagcggccatctgaccattcaaatcgacctgaccaacaacgagaccggcaccgtgaatgtcaacggcaccgaccgcaccatcgtcaccccgctcatcacggcggtgggcgtcatctttggggaggacgcctccaatgtgaccgctgagcacggcgtgatcgagtctgccgccaagagcaacgtggccgcgttcgtcaccctgcctggcgtgaaggattcgctgtccggcctgctgccggaggacctgtccacggtggaagattatttgcaggacagcgtgaccgtggaagccgatgtggaaaatctggcagctccgcagatcatgctggccgcagccaccagccccgatgcgctgggcacggacaatgtctttgacctcgacagcatcaacgagctgaccgacggcatccagcagctgaacgacgccatgagccagctcatggacggtgcgtctcagctggaagacggcgtctcgcagctggccggcggtacgctggctctgctggatggtgcatcccagctgaagaccggtgttgccacgctggacaacggcctcggccagctgaccaacggcctcgataccctgacctccaacaatgccgccctgaatgctggtgcccagcaggtggccgacggcgttctggcttccgcaaacaagaccctgatggaaggcggcctcatcgacacccccatg

SEQ ID NO: 625 - DNA, 858 bp, Faecalibacterium prausnitzii
  misc_feature: SEQ ID N?1555832
atgcccaacatcgtcatcatcggttccggcccggccggcgtgtcggccgctctgtacacggcccgcgcaggggtcgaaacgaccgttctcaccaaagggcccggcgcactggaccgcgccgcacacatccagaactactacggctttgctgaacccatctccggtgccgaactggaacgccggggcatcgaaggggccagagcgctgggggtgcagttcgttaccaccgaggccgtgggcttgacttacaccgacaaactcaccgtcgagacgctggcgggcgagttccccgccgatgccgtcatcctggccaccggcgcttcccgcaccgcaccgaagatccccggtctggcagagctggaaggccatggcgtgagctgctgcgccacctgcgacgcctttttctaccggggaaaggatgtggcggtgctgggcagcggcgaatatgccctgcatgaggtgcaggcccttctgccagtggtaaagagcgtcaccctcctgaccaacggggccccgctgacggcacagttcccgccggaggtgagggtctgccccgaaacggtggacgccatcctcggcgaacagaccgcccccggtgtgcagctgaacggcggccgacgggtgcccctgtccggcgtgttcgtggcgctgggcgtggcgggcagcacggcgctggcccgcaagctgggggccgaagtcgagggaaaccgcatcgtcgtggatgagaagatgcagaccaccctgcccggcctctacgccgccggagactgcaccggcgggctgctgcaggtcgccaaggccgtttatgagggagcacttgcaggcaccgaagctgccaaagcggtgcggaaaggataa

SEQ ID NO: 626 - DNA, 1041 bp, Faecalibacterium prausnitzii
  misc_feature: SEQ ID N?1556202
gtggacactatacgcaaaggttcgcttcccaaactgcgggaaaaactgctcgaagcattgcaggccgtgctgcccatcgtggcgatcgtgctggtgctctgcttttccatcgcgccggtctcccccagcatcctgctctgctttctgctgggtgcgaccatgatcattgtgggcatcatgttctttaccctgggttccgagatgagcatgagccccatgggcgagcgggtgggcgcggtgctgacccggagccgcagcgtccccctcatcatcggggtgggttttgcgttgggcttcctcatcaccatctccgagccggacttgcaggtcctggccaaccaggtcccctccatccccaacatgacgctcatcctctcggtcgcggcgggcgtgggcttcttcctcgtcgtggccttcctgcgcatgctgctgggcatcgcgctgcccaagctcctcgtcgtgttctatgggctgatcttcgtgctggcggctttcgtgcccaaagagttcctggccgtcgcctttgactccggcggcgtgaccaccggccccatcacggtgcccttcatcatggcgctgggcgtcggtgtggccgccatccgaagcgaccgccacgcggcggacgacagcttcggcctcgtggccctctgttcggtcggccccatcctggccgttctgctgctgggcatcctgttccgggccagcgacagcgcctacgtcccgcccatcctgcccaatgtgggcgactcggtggagctgtggcagctgttccatgtcagcctgcccacttacttcaaagagatcgccacctcgctgctgcccatcgtgctgatgttcggcgtcttccagctggtggccctcaaactcgaccgccggacgctgggccgcatcggcgtaggcctggcctatacgtacattggccttgtgcttttcctcaccggagcaaacgtcggctttatgccagcaggtaattatctgggccaggtgctggccgggcagaccttccgctggctcctcgtccccatcgggatgctcatcggc

SEQ ID NO: 627 - DNA, 816 bp, Faecalibacterium prausnitzii
  misc_feature: SEQ ID N?1556370
atgcgagcggaacgtgataaactgaatgcaaagacgctggcgctccagctgcggatgaccgagagcgagtaccgcctgcaggaggacgaggagacctgccgcatcctggtggtgaccggcggcagctgcacgttccagcggggagatgcttcgctgctggtcacccccggctgcgtgctgctgctggggccggggggcggcgtgtttcagcaggcggggcatctggccccggagctgatcggctgccgcttcccggcggcggtgctgaccgagctgaagagcgtgatgcagcgggatttcagcccgctgttcgagccagacgacccgatcctgctgtacggcccggtgcagtgggccagccgcctgcgcaccctgctgaacctgatgcggagcgccgccggggaaccggactgccccggcatcatctacctttcgctgctgctgcattatgtggaccaggagtgcaaagccgagcggcagaccgcccgcccccggaacgagactgtggagcagatctgcgcctacctcgccgcgaactatcagcagaaattctccctcaccgatgtggcggcgcggttctatctgtcgccctactacctcagccgtctgttccggcgggtgacagggcagtccatcgtggactacatcaacggccgccgcatcgaggccgcgcagcatctgctggagaccaccgacctgaacatcagcgcagtggccgagcagaccggctttgcctcggcggcccacttccgccgggtcttccgggagatgatgggcgtcggcccattgcagtaccgcaagagcagccgcggctga

SEQ ID NO: 628 - DNA, 753 bp, Unknown
  BMI gene
  misc_feature: SEQ ID N?1556372
atgtcagaaccgatcttgaccgtggaccatctggtgaaaagctacgatggtcagacgaacatcctggataacgtaagctttggcgttcagcccggcgaggtcatcgtcgtggtggggccgtccggctgcggcaagagcaccctgctgcgctgtctgaacggattggagccggtgcaggcaggccgggtgcagctgggcagtgagaccgtcgcctacggcggcaagaatctggcggccctgcgccagcgcatcgggatggtgttccagagctacgagctctttccacacctgaccgtgctggataacatcctgctggctcccaccaaagtgcagaagcgccccaaatccgaggtgcagcaggaggccgaagccctgctggaccgcgtgggcctgctgcaaaaagccaaaagctacccgcgggagctttccggcggccagaagcagcgcgttgccatcgtgcgggcgctgtgtatgcaccccgaaattttgctcttcgacgaagtgaccgccgcccttgacccggagatggtccgtgaggtgctggatgtcatgcttgacctggcccgcgagggcaaaacgatggtcatcgtcacccacgagatgcagtttgcccgtgccgtcgcgaaccgtgtgctctttctggatggaggccgcatcgtcgaggaggccccgcccgcgcagttctttgaccacccgcagaccgaacgtgcgaagaagttcttgaacaccttcacgtttgaggcagtgaagtga

SEQ ID NO: 629 - DNA, 732 bp, Faecalibacterium prausnitzii
  misc_feature: SEQ ID N?1556549
ggcgtgaccgcagtgctggccgaaaagggcgtacagcccgcatacaccgccgggctttccctcggcgaatattccgcgctggaagcagccggagtgttcaccgcgaaacaggccatcgagctggccgcctaccgcggcaaagccatggccgatgccgccaacggcatcgactgcggcatgaccgccgtgctgaatctggaccgcgagacccttgcgcagtgctgcgaacaggcttcggctctgggctgtgtccagatctgcaactacaactgtccgggtcagctggtcatcggcggcgaaaaggctgcggtggagcaggctgctgcgctggcgaaagccgccggtgcccgccgttgcatcccgctcaacgtgagcggccccttccacacccggctcatggcccccgccggggacgccctcgcccgccggttcgagaccgaatccttcggcgaaatgcgcgttccggtgctgttcaactgcctgggccgcgaaaaggctgcggaggacagcatcccggccctgctggtccggcaggtgcagagcagcgtccacatggaagataccctgcgccgtctgggcgagctgggcgtggaccacattctggaagtcggccccggcaaggccctgagcggttttgtgaaaaagactctgcccggcgtcgaatgcgctgcggtggagaccccggaagaactggacgccgtgctggacgcatggaaaaaggagaccgtatga

SEQ ID NO: 630 - DNA, 489 bp, Faecalibacterium prausnitzii
  misc_feature: SEQ ID N?1556775
ggcaagggcgcttacagcctctcgaaggacatcggcgtctccgtcaaagaggcggacgccttcctcaaaaattatctggccgcgttccccaaggtaagcggctacatggacaagaccatcgccgacgcgcgggcgtgcggctacgtctccaccctgttcggacgccgccgcgccctgccggagctgaccagtgccaaccggaacatccgggccagcggcgagcggatggcacgcaacacgcccattcagggcacagctgccgacgtcatcaagctggccatggtgcgggtctggcggcgtctgcgggacgagaaaatggagagccgtctcattctgaccgtccacgatgaactcatcgtggaggcaccggaggccgaggccgaaaaggccgccgccatcctgcgagaagagatggaaggctgtgtgcagtacgccgtgcccctgagcaccgacgtgcacaccggcaaaaactggctggaggcccattga

SEQ ID NO: 631 - DNA, 312 bp, Clostridium leptum
  misc_feature: SEQ ID N?1556932
atgagcgaagaatgcacccatgactgctctacctgcagcgcagcatgttcttcccgcgaggctgccccgcagcatgatgcccccaaccccaacagcagcgtcaaaaaggtcatcggcgtcgtatccggcaagggcggcctcggcaagagcatgaccagcgccctgctggcctgtgcaatggcacgccgcggctaccactgcggcatcctcgacgccgacatcaccggcccgtccatccccaagctgttcggcatccatggccgtgccatggccgacgagaagggctgctggcccatccagagccggatgggc

SEQ ID NO: 632 - DNA, 1260 bp, Faecalibacterium prausnitzii
  misc_feature: SEQ ID N?1558245
atgcgggcggccagcctgtttctggccatggcctgcctgctgctgaccgtttcggtctacccggccgcggcagcgaccagcatgtccagcctgcagaacaagctgaacaagctgagccaatccatcgagcagcacaaaaaagagctgtccgacgccaaaaagaaagaacaggccgccaaggctctggaatccgaactgaaggaaaaggtcacggtggtccaggggcagatcagtgtgctcaaaacgcagatcgcccaggtgcagaacagcatcggcctcaaggagcaggagatcgccgccaaggaagaggagatcgccgccaagcaggaggaaatcgccgccaagcagggcgagatcgacgcccagtggagtgccttcaagggccacatggccgccatgcaggagctgcgggagggcggcagcgtggcgatgctctcctcggtcaccaacctgtatgagctgttgaccttcaatgaagcattgcaggatatctcggtcaaggataccgagatcctgaccaatatgcgcaacgcgaaggaagcgctggaaaacgacaagctccagctcgaagagcagagagcggagctgaagacacagaaggcagacctgcagagcaaaaaggcagatctggatgcacagaacaaccagatgagcgcaaagcagaaggagctgaactccagcgtcgctgccgccaagatgagcgcagccgaggctcagcaggcccagaaggatgcgcaggcggccatcgagtcggatgagatgaactatgaggcggtcaagaaggaaatccagaagctcatcgcccaggcggctgcggccaagccgcagctgagcttcaccggcttcatctgcccgctcaagagctatagccgcatttccagtgagtacggctggcgcaagaacccggtgacgggcgtgaacaagctccacgccggcaccgactttgcggcccctgccggaacgcccatctatgccgcagccagcggctatgtgcaggtggcgggctggtccagcggcggctacggcaactatgtcatcatctaccacggcaagatgtcggatggcaaccagtacagcacactgtacggccacatgcgctcggtggcgacctctgcgggcaaatatgtcaagcagggcgagatcatcggctatgtgggcagcaccggcaactccaccggtaaccacctccacctcgaagtctggaagggcggttccaaggccaatgccgtgaatcctagaagttatattcccatgagataa

SEQ ID NO: 633 - DNA, 1152 bp, Faecalibacterium prausnitzii
  misc_feature: SEQ ID N?1558722
atgctgcaaaatcctgaattgcattatctggacaacgccgccaccaccatcgtggccccggacgtggcggatgtcatcgacagggccatgcgggagcactgggcgaatccgtcgtccctgtacgcccccggtgcccggagcgaagaagccctgaacgcggcccgcgccgtggtggcccggagcctgggctgcaaatcgcgggagctgtacttcacctcctgcggcagcgagggcaacaacatggccctgctgggcgcggcgctgacccggaagttcggcaagggcatcgtggtgtccggttttgaacaccccagtgtgcaaaagccgctggaacgtctggctgcgatgggctatgacgtcacggtcgtggccccccgcccggacggtacgctggacatcgacgagatgctgtcgcatgtggacaggaacaccatcctcgtggcctgcatgatggtcaacaacgagatcggcacccggaacgaggtcgagcgcctggccgccgaggtcaagcggaagaacagccgcaccctcgtccatgtggacgcggtgcaggcgtggatgcgggtccccatcaagctggccaacatcgacacgctggcggtgagcggccacaagatccacgcgcccaagggcgtgggggcgctctacctcagcgacagtctggcacaggcgttccagccgccctaccttggcggcgagcaggagcgtgagaagcgccccggcaccgagaacctgccctacgcggtggggctggccgctgcggtcagccgcctttcgaagaacatgaagagccgggacgccgccgtccgcgccctgaaccagcagctgcgcgaggggctgaaagccttccccgaagtggagatcaacagcccggacagcgccgtgccggaggtgctgaatttcagcgagaactgcatcaagagcgagacgatgctggcatttctggcggaggagcagatctatgtttcgtcggccagtgcctgcgggcggggtcagcccagccacacgctggcggccatgggccgcagcccgctggccatcgacacggccatccgggtgtccttctgtgcagacaacacccccgaagatgtggatgccttcctcaaccgctttgaggacggcatgaagcatttgcagcggatcaaacgataa

SEQ ID NO: 634 - DNA, 189 bp, Unknown
  BMI gene
  misc_feature: SEQ ID N?1559333
atggcagaccgaccccagaaccggaagaaaaatgggaagcgccgcccggtctacgatcaggcgcgggacacccggcccagccgcccggcagaccggagcaatgtgggttatccaagctccacgacgcccggcagacacccggtgaccaacccgaactatgaccccgatgcgccccggcccagccgctat

SEQ ID NO: 635 - DNA, 2403 bp, Faecalibacterium prausnitzii
  misc_feature: SEQ ID N?1559501
caggtctgccggttgaaggatgtctatgagctgctgctggacaccggcatcgggcggaacggctattcggtcatcgggcagggccgcatggccgagatcgtggctgccaagagcaccgagcgccgggaaatctttgaggaagcctgcggcatcgccaagtaccgctaccgcaaaaacgaggccgaacgccgtctggcggcagccgcagaaaatctggagcgcctgcgggacatcctgggcgagctggaagcccgcgtcggcccgctggaaaaagagagcgccagggccgagacctttcttgccctgagcgcgcagcgcaagacgctggaagtcacactctggaccgacggcgtccaccgcgccagagaggccgtccgccgccaggtgcgggatcacgagacggcccaggccgactatgaacgcttcgaccggcaggtcaaagccgctgagagcgaggctgaggagatccggatgcaggcacaacagctgaccattgcggtcgagcgcttgaatggggatatccgcagcatcaccgagcagatcagcggcagcgagagccggatcgccgtgctggaaaacgacatcgcccgcaacgaggagagcgccgaagaactgcgggccgagcttgctgccggtcagcaggacagcaccgaagcagtcgccgcattggagcgccaccgcgcagtggccgcctccatggaagccgccgggcagcagctggccgcagaactggcggcactgaacgaagcactggaccgcctgacccacgacaacgaccgcagcggggcgcggaaggacagcctgcgggcggagatcacggcgctgacggcccggcgcaccgaggcacaggtggccagagccgccgccgaggccgctgccgaaacggcgaagagccgcctgcctgcgctggaagaagccgccggggcgctgacggcccagcgggacgacgccaagcaggaccttgcggataccgtgaagtaccgcgcgatgctggcggagaacgaaacccagctggccaatgtccgcgcgggcctggaactgaagtacaaggcccgccgcgccgcgctggatgccgctgacgacgacgagcagaagctcagccgcgcactgggtgcggcccgccagcggctctcggtgctgcgggagctggaaaagaacatggacggctaccagaactccgtcaagaccgtcatgcgggccgcgtcggcccggcggctgaggggcatcatcgggccggtgtcctccatcctgcgcgtggaaccgggccgggaggtcgccatcgagaccgcactgggcggtgccttgcagaacatcgtggtggagaacgaagccgctgccaaggcgggcatcgccctgctgcgcagcgagaacgcgggccgcgccaccttcctgccgctggataccgtccagcccggcgtgttccgggggcggctgaccggttcggcccggctggcttccagtctggtgcaggccgatgcacggtatgtcaacatcgtttccaatctgctgggccggatcgtggtggtggacgacatcaacgaggcttcccgcgtagcgcgggacctgggctaccacaataaggtcgtcacgctggacggtcaggtcgtcaacgcgggcggcagcttcacgggcggcagcgtccagcgcagcgcgggcttgttcacccgcaaacaagagctggaagagctgcgggtgaaggcggcaaagctgcaaaaggactgccttgccgcgcaggagaagactgaccagtgcaaggcgcagatggatgccgtttccgccgagctgaccgcggcgaacagcgaacagatcacggctgcgaacgaccgggtccgggccgaagcagagcagaagcggctggaagccgccgtggagcaggccgaaacggccctcgctgcccgccggaaggagatcgacaccctcaacgcccagcggaccgaaagccgcaccagagcggccgaggccgaggggcaggaggcggagtgcgctgcggcccttgcggaaaagtcggcggaactccagcacatcgccgagggcgacgatgccttcctgacccgccagcgggagctggccgaccagctcagcgccaagcggctggaacagatcacccgccagaaggacgccgagctggctcaggcgcagatcgccgcgctggaacagcgcaccagagacgctgctgcccgcaaagcatcgctggaagagagcctgactgcgctggccgatcgcagtgcggtctgccgggcggagatcgaagccatccggaaggccaagagcgagagcgcagagcagatcgctgcgaaggaagcagagatccgccgggccaccgaggagcgcctgacccgccagaaggctgagaccgaagcgctggccagggcccgcactgccgccgatgagcgcgaggagatg

SEQ ID NO: 636 - DNA, 1050 bp, Unknown
  BMI gene
  misc_feature: SEQ ID N?1560267
atgttttttcttctctaccgctcagtaaaacaagtaaaagccttacatagttctgctttacctcttcaaaatgaagaactaaacgctctttatatagaatgtttaaacgaagtgaacagcaagcataccattccgatttatagtacagcatttttgaaatctcctgttttggctggtttcctgcatcctcgcatttatcttccaattcacttgatttcagattttaacgctggaactataagcgcaactgatattcgctatatgcttcttcatgaactgcagcactacaagcataaagatattctaattggatatttgataaatacagtaaatgttttctactggttcaatcccctaatctggtattttctaaaaagaatacgtcaggaacgggaacttgcctgcgacagtgctgtattacaattattgaaagaaacagaatacaagtcatatggaaatacactgattaactttgccgaaacaatagctctgtctccattccctcttactatgggaattagtggaaatataaaacagttaaaaggacgcattttaaatattgcatcattccaccaacctacttttaaacaaaaaattcgtggatatcttatatgcatattcgtctctactatcatcattggatgcattcccatactttctgcttatgcttctgatcagactgggtatcattttgacacaaccgaaaagaatattactcagctaaatctttcttccaattttggggactacactggaagttttgttttatatgatcagtctgctgataaatggaatatttataatatggagcatgcttccacacgtgtatcaccgaattcgacttataaaatatatgatgcattacttggcttggaatctggaattattacaccagaacattccactttcacatggaatggagaaccatatccttttaattcatgggaagccgatcaagatttaacctcggctatacataattccgtaaactggtattttcaggcaattgattcacaggcaggttttgaagccgtaagaacatttttacag

SEQ ID NO: 637 - DNA, 1560 bp, Faecalibacterium prausnitzii
  misc_feature: SEQ ID N?1561054
tacctgaccgatgcgttccgcaatctgcaggccccgccgccgaagatctcggtgggggtgtcggtgcatggaagcgtcctcgacctggaagtagacaccggtgcgttcccggtgggggagctgaaggccctgctgaagtcgctccaccagaaaaaacgctaccaccgcctgcgggatggccgcctgctcaagctggacgaggagttcgaggggctggacgagctgaacgagacgctggaactctccggggtcaagttgagcaagaaccacgcggaactgcctctttaccgggcaccgagtctggatcgagcgctgtcggggcagagcgggatccacttcaaccgcgacgatgcgttccggcggatcagccgcagcttccatgcggtaaaggacagcgagtatactccgcctgcttccttacaaaaagtattgcgaaagtaccagcgcgatggctaccgctggctgcggacgctggacggctacggtatgggcggcatcctggccgatgatatgggtctgggcaaaacagtgcaggtgctgagctacctgctctccatcaaggagctgggggaggaggctctgcccagcctcatcgtctgcccggcgtcgctggtgctgaactgggccgaagagtgccagaagttcacgccggagctgcgctgcatcgttgtggacggcggcgcggcccaccgcgcggccctggccgaacagtgggagggagcagaccttgtggtgacgagctacgacctgctccgacgcgacgaggcgctgtatgcagaccggaaattctatgcctgcatcctggatgaggcgcaggccatcaagaaccataccacccagaaatacaaggccgtgtgccgggtgaacagccgggtgcgctttgcgctgaccggcacgccggtggaaaaccggctgggtgagctgtggagcatcttctccttcctgatgccgggttatctgccgccctataagagcttctgcacccggttcgaaaagcccatcgcgcaggagaacgacccgacggcggtgcggcggctgaaccagctgaccgggccgttcatcctccgccgcatgaaggcggaggtgctgaaggagctgccgcccaagaccgagaacatctaccgcatcgagctggaagaagaacagcgcaagctctatctggcggcggtgctggatgcccgcgaaaagctcaaggcggccaaacccgaagacaagatggccgtgtttgccgtgctgatgcggctgcgggagatctgctgcgacccgcatctcatcgccgacaactgggagggcggcagcgccaagctggacgcctgcaccgagctggtgacctccgccgtggagggcgggcaccgcatcctgctgttcagccagttcacctccatgctggacctgctggccaaacgtctggatgaagcaggcatcagccacttcacgctgcagggctcgaccccgaagccggtccgcgccgagctggtgcggcggttcaacgggggcgaggtgagcgttttcctcatctcgctgcgggcgggcggcaccggcttgaacctgaccgccgcc

SEQ ID NO: 638 - DNA, 492 bp, Faecalibacterium prausnitzii
  misc_feature: SEQ ID N?1564417
ttcaccctgctggtgaactacgacctgaacggcaccaccgcttccatcagcatgaccgtcatcaacgagggcgacgtcccgatgcccttcagcttcggctatcacccctattttacggcctccgctctggagaatgtggattttgacatccggtgcaagacctgctccgagaacgccaagggcgagcagcccgccgctccggagaagatcaccttgacccgcaaggaaggcgccgacaacaccatccgcctgatgacgggcgtggagttcccgatgagcttcaccgacaagggcaacggccacaaggtcacggtggacgccgacgacagcttcaacaacggtgtgctctggcagcaggacgcggagagcttcgtctgcatggagccctggaacggctgggccaacagcgtcaacgaagaaggaaagcacgaggtcctggagccggatgaggccctgaccagcgagtggaccattaccatcgagaaagtctga

SEQ ID NO: 639 - DNA, 1041 bp, Faecalibacterium prausnitzii
  misc_feature: SEQ ID N?1565761
atggaccagtccaccccgcagcagccgtcccgcaaaaaaacgatcctctcgctcaccattctggtggtgctcaccggcatcgtcttctggatcttccagcgccactgggccgagatctctgccgcactggcacagctgcgcttctggcaggtactgctcgtgctggccgtgggcctgacctacccggtgctggaaggtctggtcagctgggtcatcatccgcagccggatgcccggcttcaccgtgcggcaggcgctggaatcgtcgttcatgggcaccttcggcaacgtcatctgcctgggtgccggtgccatgccgatgcagtcctactacctctaccgcagcggcctgccgcttggccccggcgtgggcctgatgaccttgcaatacgtcttccacaagaccaccgttctgctttacgccaccgtgatgctgttgctacagcaccggtggctcgccgccaacacctccggcgtgatgaactatctgcccatggcctatgccgtggtggccgtcatcatcgtggcgctggtgctggtctgcgtatcgcccctcatccagcggctggcccgctgggcactgggctacctgcccaggactgactcctggcagacccgccgggaaaaatggctggagcagctggacaccctcggcaccgagagccgccacctcctcgccgacaagggccgctgcatccagatcttcgcgctgcacaccctcaagctctttctgatgtacaccctgccgtatctctgcatccggttcatggctctgccctgcggcctcagcttctggcaggtgcagctgctcgccagcctgatgctcttcctctccaatgccctgcccaatgtggccggtatgggttccatcgagacggcttttctcctcgtcttcggctccttcatgacccgcggcgaggccatgagcaccctgatgctcttccgcatcgccagctactacttcgtcttcggcttctccgccgtggcctccctcttcgcccagaagcatctggaccagatggatgcacagaagcgctcctga

SEQ ID NO: 640 - DNA, 201 bp, Faecalibacterium prausnitzii
  misc_feature: SEQ ID N?1566124
gccgtcggcgtacccgccgcggtggtccgcatcaacaacaaggctgtcaaccccgccgacgacctcgaccagcaggatctgcccgatgtggtcgcccagcgcatcaccgacctcgaccgccgcatcagtgccatggagaaggccgcgcagggcgatgttccgccgaccatccacgacatccggaaacgcagcccgaaatga

SEQ ID NO: 641 - DNA, 759 bp, Faecalibacterium prausnitzii
  misc_feature: SEQ ID N?1566504
ttgaacgggatcttttttctgttggcggcggtcctgctgctgccagcctgctgcacaacggtgggggcggccggtgtctttctgatgcggccgacgcaggagccgaagacgcggcggatgctctgcggcatggcggcgggcatcatgctggcggccagtgtgtggagcctgctgctgccggccatccagcgggcagaggaagggttgctgcctgcgtggctcccgcccacggcggggctggtcatcggagcagtgggcctgctgcggctggaacaggcggcggggacgctgctgacaggtgccggggccgggcactgcggccgaatggtgctggccgtgaccctgcacaacctgccggaaggcatggtggtgggtctggcggctgcgctggcgctgtccggggaggcggacgccatgagcggtgctctggctctggcgctgggcatcgggctgcagaacattccggagggcgcggcggtcagcctgccgctgctgcaaaacggggagagccggaagcgggcgttcggggctgggctggcctccgggctggtggaaccgctgggggcgctgctggcactggccctggcgggctgggtgcaggctgctctgccctggctgatgagcgccgccgccgggtgtatggtctgcgtgacggcgcaggagatgatccccgaagccgtggaggccgatgagcctgccggggtcatcagcgtggtgctgggctttgcgctgatgatggcgctggatgtggccttgtga

SEQ ID NO: 642 - DNA, 252 bp, Faecalibacterium prausnitzii
  misc_feature: SEQ ID N?1566622
ggcagtgccagcaccggcaagggccgcacggagcgcagcactgcgggccagcccgcccgcgcaccccgtgccccgaagcaggaggcctcccgcagccgcggccggaacagtgcgcccagccgggacgaagatccgggtctggtcctcatcagccgccgcccgccgcagcagaagttcaccaacttcgaagagtatatgaacgcccacggcggcgcaacggctcccatcgaggatcacagcgatgaagtctga

SEQ ID NO: 643 - DNA, 2586 bp, Faecalibacterium prausnitzii
  misc_feature: SEQ ID N?1567335
cggccgcccgccatcagcggcgcacagtgcaccacccgccgggaagccctcatcgacgacgccactgccaaactggccgatgccaagcagacctacgacgagcagaaagcggaggccgaacgccagtttgcacaggccgagcagaagctcgacgaggccgaagcccagctcaccgccgccaaagcgcagctggagcagggcgaagcggagtacacctccggcaaggcgcagctggcccagcagaaagccgccctgcccgacaccatgcagagcggtgcagacaaagtgctggtcggcgaggagcagatcttggaatttgaagaccagctccagcagatcgagcttctggtcaacctgaagcaggtggccgacccgctgctgacctatgccgaagccgcgctccacaacgcacagaaagcgctcgacgaggccgagcccgccgacgaggagtacaccgagctgcgggatgccctcgccaaggcacaggccgcctacgacagcatctacgcccagctcaacggctaccagcagcagctggacgagggcaagcggcagatgtatgcccaggggctcctctcctcgcccagcctttccaataccgaactcgtcaccgaggccaaagccgctctgcggaagatgaagctggaactgatgcagggccagctggggctttccaccggcaccgcctctgcctattccgcctttgctgccgccgaacagcagctcgccgatgcccgcacccggctggatgacggctgggctgaatacgataccggcaaagagcagctggacgcctcccgcaccgaatacgcaacgcagaaagccgaggcggagcagaagctcgctgacggccagaagcagatcgatgatgccgaagagcagatctctgacatccagaacggcgagtggtacgtcctcgaccggaacagcaccatgagcttcgtcacctttgagcagtatgccgaccggatggacgccatcgcacgggtcttccccgtattcttcttcctggtggcggcactggtggcctccaccaccatgacccgcatggtggacgaaaaccgcctgcagatgggcaccctgaaagcgctgggctactccaacaccgccattgcgggcaagtacctgttctacggcctggcctccagcatcctgggcagcatcctgggcatggcggtgggcttcgtcgtcttccccaccatcatctggcaggcctatcagaccatggtgttccgcctgcccaccttcaccctgcaattctaccccggcatggccgtgggaagcgtcctgctcagtgcggccgtcatcggcatcaccacctgggaggcctgccgcgccagcctgcgcgagaagaccgccgccctgctcctgccccgcgcaccggtggccggcaagcgcatcttcctcgaatacatcaccccgctgtggaagcacatgagcttttcccagaagaccacggctcgcaacctgttccggtataagaagcgcttcttcatgaccgtgctgggcgtggcgggctgcacggccctgcagctcatcggctttggcatccaggattccatcctgcccatgctcaaccgccagaccaccgagctgaaccacagcgacctgaccatctcgtacagcgacgccagagccttttccgtggaacacggtctgggcgatgtgctggattccagcgccgatgtgaccagctggggccgtttctacaacaagagcgtgaccatctacaatgccagcggcgacaagcagaccgtaagcatcgtgacggcggaagacgagagccagatgaccgcatatttcaccttccgcacccggcaggggcacaaggccatcccctttgacgacagcagtgccatcctgaccgagaagaccgccgagagcctggaccttgcggtgggcgacacctttgaggcggagaccagcgacggcagccgcaaaacgctgaccctgaccggcatcaccgagaactacgtcttcacccggctgtacctctcgcaggcgcagctccggacgctgacgggcggcaccctgccggagtggaacaccgtttacggccagaccgactgccccacctcggacgaccgcaacaccctgcgcaccgacctactggcctgcaattacgtcagcggcgtctccttcatggaggacacgaccgaaatgttcgacaacctcatcggctgcctgaactatgtggtcatcctgatcatcgcctgtgccgctgcgctggccgccggggtgccccacaacctcatcaccgtgaaccttggcgagcgcaaaaaggagctggccaccatcaaggtgctgggcttcttcgataacgaggtctaccgctacatcttccgcgagatcgacctgctggccctcatcgggtcgctggcgggccttgcgctgggtgtgccgctgcatcagttcatcgtccgcaccgtggagatggaccagatgatgttcatccgctccatcgcgccccgcagctacctgttcagcgtagccctcaccctcttcttcaccgtcgtcgtctgccgcctcatgcgccgccatgtccggaacatcagcatggtcgaaagcatgaaggcaccggaataa

SEQ ID NO: 644 - DNA, 912 bp, Faecalibacterium prausnitzii
  misc_feature: SEQ ID N?1567939
gtcaagctcatcgacagctgctacgagggcgagccgctgcaggccatccacgaggctttgagcatggtgcgcggcagctacgcgctggccgtgctcttccgggatttcccggataccgtctttgccgtcaagcgggagagcccgctcatcgtcggctggggcgaaggggagaactttgtggcgtcggatatcccggccctgctcaagtatacccgccggtaccgtgttctcgaagaaggcgaccttgccgtcgtgacgcgggagggcatccgcttctacaacgagttcgccgagccggtggagcgggaggtcctgaccgccgattgggacatggaagcggcggaaaagggcggttatccgcactttatgctcaaggagatcaacgagcagcccgccgccatcacggcaacggtcagcccccgcgtggagaacggcctgcccgacctgcgtatcccggagctgtcggatgaaaagctgcggggcatcggcaccatccatctggtggcctgcggcacggccatgcacgcgggcatggtgggcaagtcggccatcgaagcgctggcccgcgtccccgccgaagtggacatcgccagcgagttccgttaccgcgaccccatcctgaacaaaaacgatctggtcatcatcatcagccagtcgggtgagaccagcgacacgctcgcggctctcaagctggcaaagagccggggcgtgccggtgttggccatcgtcaacgtggtgggcagctccattgcccgcgcggcagactatgtgctctatacctacgccgggccggaaatcgcggtggcctccaccaaggcttacatggtgcagatgtgtgtgctgtacctctttgcgctacggctggcctatgcgcgcggtgcccagaccgaggccgagacccgccgcctgacc

SEQ ID NO: 645 - DNA, 207 bp, Unknown
  BMI gene
  misc_feature: SEQ ID N?1570930
atgacaagatttaaatggatcaaccgctggattaccgccgatttaagcggaatccatataattttggccggcgtgtctgttttcctctacattgccggatacttcattcccagttcacggctcatgacagcagggtatgcgggattatatctggtaatccttttctatctgcttcatctgcagctccattcctgcgacagttttctg

SEQ ID NO: 646 - DNA, 447 bp, Faecalibacterium prausnitzii
  misc_feature: SEQ ID N?1571266
accgacaccaacatggcgctggccggcatcacgcggcccggccttgccaaagtgggcagcgcggcgctctgctacatggccgacccggaggtcgccgccgccgccaagaccgccgggaccacccgcgctgtggcctccatgcaccgggccgcgcaggagcatccgggtgccattctggccgtcggcaatgcccccacagcccttctgaccatcgccgaagagatcgaggccgggctgcggcccgcgctggtcatcggggtgccggtcggttttgtgaacgtggtggaaagcaaagagatcctcttcgccgcctgcgaagcccacggcgtccccgccatcgccgccatgggccgcaagggcggcagcaccgtggcggctgccatctgcaacgcgctgatctactctgccgccgaaatgctggaccccaccgcgagagggtggaaatag

SEQ ID NO: 647 - DNA, 747 bp, Clostridium bolteae
  misc_feature: SEQ ID N?1572246
atgatattcgcaattgcgaaccaaaaaggcggcgtattgaagactacaacaacttataatgtttcgaaggctttggccgaagcaggaaagtgtgtattaatggttgatttggatagccaggccagtttaactatttcgacggggcatgagccgtcagaatatcagaatacaatctgtgatcttctgaaaaaacgcccggaaaaggtagaaaaatgtatctataatatagctgaaaacttagacctaataccatccattattgatttggcatctctggagatggaacttatgtcgagaaccgcaagggaaagtgtgctttcaagagcacttgaagaagcagctaaatatgattttatactgattgactgtccgcctcaactttccatactgaccttgaacgcacttgctgcagctgatgcggtaattataccatgtaagacagattacctctcctatcgcggcttagagcagctggaaaatacaatagatgaggttcaggatctcgttaatccggatttacatattttcggcatcgtggctactctatacgagatggtagtcaaagatcacaatgaaattttagatatgctgaaagaaaagtataatgtaattggagtaacaaagaaatcagcgttggccacaaaaggtatatatgacggtaaatgtgtggttgaaagagatccgagatctgaaattgcaaaagaatatgtcaaaatagcaaatattattatgaaggggtgtaaataa

SEQ ID NO: 648 - DNA, 327 bp, Faecalibacterium prausnitzii
  misc_feature: SEQ ID N?1572291
cgccgtgtggtcatctactctaccgcacccgatgcccagaccgacaacacctacggcgagcgccgcccgcgcggcaacggccgccggaacggtggaaaccggaatggcggctatcgcgggaaccggaacggcgaccgcaatggcagcaatcgcggcggctaccgcagcggaccccgcccggcaggcagccgcggcggccgcggctccagtgtgccggagcgcacctatgcgccccgcgacgcggaggatgcagcacccgtagcacccaagcgcaccgagcgcgtggacgatttcgccgatttcagcttcggcaagatcgagatctga

SEQ ID NO: 649 - DNA, 135 bp, Unknown
  BMI gene
  misc_feature: SEQ ID N?1575899
gtctcagagggaatcggagttttggactattgtgtaatccgcgacaaatcctcagacgtcggggctccgcgcgcgaaaagcacagaatacccctccgcccacttcccagtcgcggccaaactgtctattaaatag

SEQ ID NO: 650 - DNA, 222 bp, Faecalibacterium prausnitzii
  misc_feature: SEQ ID N?1576240
atgtcccttgctgaaaagatcttcggtaccttctcggaccgggagctgaaaaagatcaacccgatcaccaaaaaggtgctggccctggaacccaaataccaggcactgtccgatgccgacctgcaggcccagacccccgcgctgaaggcgcgtctggccggcggtgagacgctggacgatatcctgcccgatgcctttgccgtctgccgcgaggccgcctgg

SEQ ID NO: 651 - DNA, 360 bp, Unknown
  BMI gene
  misc_feature: SEQ ID N?1586727
atggtaatgaacgtacaggacagaggcgtcctgccggaagaaatgcgctatacatacagtgtctgcccggtctgtttaaaacgcattccggcaaagcgggcagagcgggacgggcagatatatctggtaaaaacctgcccggagcacgggacattttccagtgtaatctggagaaataagcgcaagtttgccgactggcgcggggaacgtccggcggtgggagaaaatgaaaatctaaattgcccggcgggctgcggtctgtgtgcggagcacaggcgcgccacctgctgtaccctgctggagatcacagcgcggtgcaatatgaactataccttctgttttgcggagccggacgggacg

SEQ ID NO: 652 - DNA, 117 bp, Unknown
  BMI gene
  misc_feature: SEQ ID N?1589094
gtaccggcccacgtagaaatgatgggacttatcggtgcaggaaacaaccctatggttggtatgacagtcgcagtagctgtatccattcaggaagctgctgataacggcaaattctaa

SEQ ID NO: 653 - DNA, 501 bp, Finegoldia magna
  misc_feature: SEQ ID N?1592065
atggggtatactttaattgatatgaaaaaaggaggaatggcaatggaaaagcagggaagggaaactattcccatcaccccatcgctccgccttgttccctattacccggcctacgagatggcactcccgtggtatcaggatgcagagctgtgccaccaggtggacaatcaaaaccgcatttatgatttgtccattttgaaaaacatgtatgagtatctgaacgcccatggcgatctgttttacatcgagtatgaagggatcctctgcggcgatgtttgtttacagaccagcggagaaattgccattgtgatctgcaaggcataccagaaccggcacatcgggcgggctgtggtaggaaagatcttggagctggcacgggaaaagggctgcccggagtgctttgcggagatctattcgttcaatgcacagtcccagacaatgttccgctcaataggatttgtgcagaaggatgcagaaatgtttgtttatccgctgagataa

SEQ ID NO: 654 - DNA, 285 bp, Faecalibacterium prausnitzii
  misc_feature: SEQ ID N?1593101
gagtacaacatgctgtgcagcattgagcggctggcccccggcatcttcgccgaggaaaagggcagcacgaagcccgtctgcgccaacgtggacctgttcagcgggctgatctacaacatgctgggcatctccgaggacatctacaccccgctgtttgccattgcccgtgtgccgggctggtgcgcccaccgcgtggaggaggtcatcttcgccaaccgtatcatccggcccgcctacaagtatctgggtgtgcgccagaaatataaaccgattgaggaacgctga

SEQ ID NO: 655 - DNA, 255 bp, Faecalibacterium prausnitzii
  misc_feature: SEQ ID N?1593169
gagcccaccggcgcgctggactcgcacaccggccgcgaagtgctggggatgctgcagcagctgcatgaggagggccacaccgtcgtcctcatcacccacgacaattccatcgccgtgcaggccgaccgcatcatccgtctggaggatggccgggtcgtctacgacggcgattcccgtgcgccggaggccatcgtgcagcccactctgctgccggagaccccggaaaaaacggcggaacaggaggtgcaggcatga

SEQ ID NO: 656 - DNA, 912 bp, Faecalibacterium prausnitzii
  misc_feature: SEQ ID N?1596989
accggcggcacccacaacaccacgagcgccgtggcaaaagataagggcgcggccagagtgctgaccgtcagccggcatccggaccccgaaaagggcgagctttcctatgcggaagccgtccacagcggggccgacattgtcatcaataccaccccggcgggcatgtacccgaacgtgggggtctgccatctggatgtggccgcgatgccggggctggaagctgttctcgatgtggtctacaatccggacaaaacggaactgatcctgcgcgccgaggaggcgggtgtgccggtggccgtgggcggcctcgaaatgctggtggcccaggccgtgtatgcggcggaatacttcctggaccgcaagttcgacgatgccccggccgagatccgcgccatcaccgcccagctccggaaagagcagctgaacgtggcgctcatcgggatgccctcctgcggcaaaacgaccatcggccgtgcgctggccgaccggctgggcaagcggttcgtggacctggatgaggagatcgtccgggccgcgggatgcagcatcccggatctcttcgccgcagagggcgaggacggcttccgggcacgggaggccgagcagaccgcccgctttgccagagagggccgtcaggtgctttcctgcgggggcggagtcgtcaagcggcccgaaaacctacgggccctgcggcagaacggcgtggtgctcttcatcgaccgcccgctggacgctctgactgtgggcggcgggcgtccgctctccaccagcgccgaggcgctgaaagccatggaagcccagcgccgcccgctctatctggccgcagccgatgcggtcatcccgaacgaaacgaccgttgcagacgccgttgcggcggcactggaggcattggatgcgatttttgttcattaa

SEQ ID NO: 657 - DNA, 1032 bp, Unknown
  BMI gene
  misc_feature: SEQ ID N?1597072
atgagacagctattgacccagctttacgtcacttcggaagacgcctatctttcgctcgacggcgaaaatgtcgtggtcagccgccagaagaccgagattggacgggtcccgctccacacgctggaagggatcgtctgcttcagccgctccggtgcaagcccggcactcatgggcaaatgcgcggccaagggcatcgacctctgctttttcagcccctacggccagtttttggcgcgcaccgtcggcgaagagcgcggcaatgtcctgctgcggcagacccagtaccgcatctccgacagcgaagcgctgagctgccgctatcggcggtacttcatccttggcaaagtttacaacgcccgctgggtactggaacgcgccacccgcgaccacccgcagcgcgtacccgtagaggaattcaaacgcacgagtgcccagcttgcggcggcgctcccgctcattgagcagtgcgacgatctcgaccagctgcgcggtctggaaggggaagcagcgcagcgctactttgactgcttcgactccctcattttacagcagcatgaagcgtttccgttcgtgtcccgaaaccgtcggcctccgctggacaatgtgaacgcgctgctctcctttgcctattctctgctggcccgcgactgcgcttccgcactgagcagcgtcgggctggacccgtatgtcggcttcctgcaccgcgcccgtcccggacgccgcagtctggcgctggaccttatggaagagcttcgcgccgtttacgcagaccggttcgtgctgtcctgcatcaaccagaaactgctgacagcgaagcacttccagaaacaggagaatggtgctgtcctcctgaccgacgatggccgccgcgcgtttctcaaagcctggcagaccaaaaagcaggagcagatcacccatcccttcctgaaagagaaattgccgtggggactggtgccttacgtgcaggcgctccttctggcgcggactctgcgcggtgatctggaactgtatccgccattcttctggaagtga

SEQ ID NO: 658 - DNA, 624 bp, Faecalibacterium prausnitzii
  misc_feature: SEQ ID N?1598739
atcgacgagctcaagagcgcgggcctgtccggccagcagctggccgaccttgccaaaggctgcggggccgagagcggcaaactgggggagctggccctgatctttcagggctacgagaccctgctcgcccgcagcggcatggaccccgccgaccggctggagctggccggagcgcggctcgaagaggcgctggcctgcggcgcagtgccgggattcttgcaggagcgggaggtcttcatcgacgagttcgataccttcaacgcgcccaaaaagcggctgctgggggcgctgctggccgctctgcccagggtgacggtggccctgtgcgacgatggggcaccgctcgtgccaggcgatgtgagcctgttttcgggggccaagcaggtggccgtgcagctgcgccagctggcccgcaaaaatggggccgaggtggctgcgccccagctgctccggcgggacctgcggcacaccgaggcccccggccttgcggcagtgaccgcactgctggagaccggcacctgtgcaccgctggaagcgccggcggacgaggtgcggctgtttgctgcgcccagccgggaagaggaggcccgcgccgctgccggtgccatccgccgcctgatgcgg

SEQ ID NO: 659 - DNA, 960 bp, Faecalibacterium prausnitzii
  misc_feature: SEQ ID N?1601619
atgtctatcaattctgctgtccgcgccacaaagctggataagatctttggcacgcccgtgtgcgctgtgctgctggcgattctctgcaatatcctgtggggctcagcctttccgttcataaaactgggctaccggctgttctccatcgaccccgctaacacggcttccatcttctgctttgcgggagtgcggttcatgctgggcagcgtgctggtgctgctgggcagcatcctgctgcagggacatgcgccgcatttcccccggggcaaggtggcggcagagtgttgtgcgctgggtctgtggcagaccaccgcgcagtatgcgttctactacatcgccgtggcgatgctcaccggtgcctttggcggcatcctgaacagcacccagagttttttaggagtcatctttgcccactttatttacggcaatgcggaccgcatgacccccgccaagaccctgggctgcgccatcggctttgcaggtgtgctcatcggcaccatcggcaaccatggcagcggcagcggctggggcgtgttctgcatgatggcagccaccgtcatctttactctgtccggcccgtggaacaagtcggtcaccaaaaaggctgatagctttgccgtctgctttctgaacctgtttgtgggcggtctggcgctgtttgtgctgggcaccgttatgggcggtcggctgcatgtacaaagtgcgctggcggtgctggtcatgctgtatcttgccttcatctgcggcgcaggctatatcctgtgggcgctgctgatgaaaaacaacccggtcagccgcatcgctatctttggtttcgtcaatccggtggtcaatgtgctgctcagtgcggtgctcaacggcgaaccgctgttccgctggcagtatctggcggcgctgctgttcgtgtgcgtgggcatctggctggtaaacaaggcccctgcccagaaggagaagctatga

SEQ ID NO: 660 - DNA, 528 bp, Faecalibacterium prausnitzii
  misc_feature: SEQ ID N?1602210
atggaacaacgaaataacctcgtgttgcagggcaccgagaccttctcccgcggcgcgctggacaatgtcgcgctggaaagcggcgctttggtgctggacagctccgccgggcggtatctgccctacggcagctacaccacgccggagttcgcgatgccggctttctgcaacctgaacgtcagctggaacgccagcgccccccataacacgatggtggaggtgcgatgccgggtctatgccgggaacacctggaccagctggatgagctttggcaaatgggccccggattacccccgctgcagcctcaacgcccagagcgaggacgggatgatcttcctgctgggggacaccgtcaccgtggccacgccgggcggcggcaccggcatccaattgcaggtcaacctctcgaccaacgacgacaaatccacccctgccgtgcggctgctggccgccgccgtccgccccctgacctgggaaaaacacgagggtcggccgctgaaccggcggctttacctgccggaatactgc

SEQ ID NO: 661 - DNA, 549 bp, Unknown
  BMI gene
  misc_feature: SEQ ID N?1602941
ggtgtgctgatgttcttcgacgcactgacgctgggcctgctggccctgtataagatgtggcggatggacgtccggctgacgatgctcgccctcatcccggccctcatgatgttcctcatcggtacgctgatgagccgggtgatgacccggcgctgggaggaacgccagcaggctttctcggatctttccgactttgcacaggagaacttctccggcatcgcggtcatcaaggccttcgtcaaagagctgaaagagctgctggccttccggaagctgaacaaggagaacgaggagatcaacgtcacctacaccaagatcgccaccctgctggaagtcctcgtgaccctcttcgtcgagtcggtcatctgcatcatcctgggctacggcggctatctggtctactgtggccggttcaatgcaggccagctcgtggagtacatcggctacttcgaagccatcgtctggcccatcatggccgtgtccatgctcatcgagaagacctcccgcggcaaggcctccctcaaccggatcaccgagctgctggatgcc

SEQ ID NO: 662 - DNA, 897 bp, Unknown
  BMI gene
  misc_feature: SEQ ID N?1603763
atgactgaacttcccatcctctattttcacgccgatgactacggcatgaccgcccatggcgatgccctcatccgggactgccagacccacggctgcctgaacagcgtcagcatcgtgcccaacggttcgctggaagaagccgtcgccgcgctgcgcccttccgggctgaagctggctgtccacctcaaccttgtggagggcaaagccctttctcccgctgcggagatcccgctgctcgtccggccggacggcagcttctgcaactccttcaccgggctgctgcggctctcgctgacgccccggcgcagggcctttgccgcccagctctaccgggaactggagcgccagctcctcgcctatgccgccctcttccccgccgggacgcccctgcgcatcgacagccaccagcacacccacatgatcccgctggtcttccggacgctgctgcatatccttgccgaccaccatctcccggtcgagcatctgcgcatcccggccgagccgctgtcgccctttgtcggctgtccccggttctggggcagctattccgccgtcaatgccgtcaagcaggccgtgctgaacggctgctggctgctcgaccgccccgcattccgccgcagcggcatccccacggccctgttctgcggtatcctcttctccggccacatggacgccgaccgcgtccgggccgtgctgccgcagtacctccgtctggcgcagaaacgcggccagccggtcgagctgctcttccaccccggcggcgtggagccgggcgggcccttctttgacccgcagaagaccgattttcaccccttctacctgtccgagggccgggcggtcgaggcccatgccctgcacaccctcagccgaaaggaagtcgagcaccttggccgttga

SEQ ID NO: 663 - DNA, 1725 bp, Unknown
  BMI gene
  misc_feature: SEQ ID N?1610182
ttgtgtatcttcttattatatttctcttcttcggtatcggctgaggataaaaaagagatttccggtacggatttgctgattatcagtagttatgtatcgggtgctccatggagtcagaccatcatttcacatatcatgcaaaaagagtatgaccggagagatgtgagtatgaaagtagagtatatgaatattctgacaatagaaacccctgagatactgaatcaatataaagaaaatcttttttcaacttatggcaataatccacctaaagcagtattgatgctgggaaatgctcctttgatattacgggatgaaatacgtaaacattggggagatatatctttgatagtatgtgctgagagcaggtatattggacccgattccacttatatgtataatcaggttgttccacaaaaagatcgcatttacctgaatgatttgcgtaaagagtataatatgacctttctgggtgcgcgtgcttttattcccgaaagtgtccagttgatgcgtcgtatgattccggcaatgaagagtctgctgttgattggtgatcagactgaccgggatattgattatgatcagcaactttctgaattgattaagacggaatatccggatcttgattataagtttctgtcggctggtacatggagcccggatcagttgctggatacactgcgacaagtggttccggaggaaacaggtattctatttgcttcatggttccacaaacgaatgtttgcgggtaatatgcttatgatggcaaactcttataaggtgattgccaattctacattgccttgtccgttttttgcattatcttcttctatttcaagtattgaagaagatgggactataataggagggtgtgtatatgatatgaacctgtactgtgaggaaattgtgaagatgattaatgctgtagctgatggcaagcaagcgtgggatattccatattataatccgaagcccatggttctttttaactatccttacatggtggattttggcttgtctcctaaaaactgtcctccggggacggtttatttgaatgctcctcctaccttcctcgaaaagtaccagtctgccttggtagtaggcagtattgttttattgttagttgttctctttttccaacttcggcgaaataagattctggaacgacttcagttggttgaacagaatcaacgcttcactcactccaaaatggctatggcattggaggttgttgatttactaccctggcaatgggatttacggacggatgaaatcacatatagttcttacaaaccgatagaacagggtaaaaaagaagtttcggaaatgacctatacgaccgatattagcgactatctcacttttgtttgtgaagaagacagagaacgtatccgacaaatatttaaagatgtacgcgctaataaagttgctagaattaaagaagaatatcgtgtccatcgtccgggtaaaacgtacgattcggaagactggatggaagcacgtgcttttgttgaacaatatgatgaaaagggaaaccctttgatcgtggtggggtcatcattgtttattacggagcgtaaggcggcagagcgtgaactgattgctgccaaagagcgtgcggaagagtccaaccgtctgaaatctgcctttcttgctaatatcagtcatgaaatccgcactccgttgaatgcaattattggcttctccagtatattggctatgacttaa

SEQ ID NO: 664 - DNA, 537 bp, Bacteroides intestinalis
  misc_feature: SEQ ID N?1612462
atggaagtggagaaagagagcgaaatatggtatgccatgcgtgctacttatcgcagggagttggatgctatgcgactacttgaaaaagaaaagttgggttgttttattccgatgcaatataagattagtataaagaaaggcaaaaaagttcgtgttttagtgcccgtcgttcataatctggtttttgttcatgcctgtccttctgaagtgaagcgtgttaaatcacagatcacatacttgcaatacataactgatacccgcagtggtcaaaaaataattatccccgacaacgagatgcagcgtttcatcgctgttgccggtacctacaacgatcatctcttatacttccaacccgatgaacttaatttgtccaaaggcaccagagtccgcatcattggtggtgattttgagggacaggaggggcttttcttgaaagtgaaaggtgcacgtgaccggcgtgtggtcattgagatacaaggaatcattgccgttgcgcttgctaccattcatccggatcttatagaagtaatcaaataa

SEQ ID NO: 665 - DNA, 111 bp, Unknown
  BMI gene
  misc_feature: SEQ ID N?1613471
aaaaaaaaaaaaaacgaacccgccaaaaaacccgccacaggtaggttagtagaaaatactaaggtgcgcgagacaactctcgctaaggaactcggcaaaatcacctcgtaa

SEQ ID NO: 666 - DNA, 1308 bp, Unknown
  BMI gene
  misc_feature: SEQ ID N?1613590
atgtcaccggaggaaataaaagattttgtaaaacagcggtttgagcatcagctaaagagcagcggtcttgatgatgtttccctctatatggacaggtttgacaccctctatgaacagggaaaaatggaacacctcatgccgacagccaaccagaagcatatcgtggaagatgtaccatttatggagtgggaaaacccatacatagataccagtatcagggaaacgggcagggaagaaacagagcttgctttccagttggcagaccgctatatcagtattcaggaagccagtgaagggtatgattatacaatttacgatatgaattaccgggaattggacggtggtgtgtatgacaatccggatataacaatcagacaggcacttgatgagattgtggcggatttgaaagagccggcgcaccggagcgctctggaaggcagcatacaggcgagtgatgaactgataccgattgattatgatggattgatagaaaaagcagagcaggcggaaatggcgcatcttgaggaacgtatcagaaatgaagtgccggaagcggcggaaagcaaggtgatagccgattttaaagcccggacagaggaattatggaatggcatcaatgggcagacacaggaggatatagaacttaccatatacgcctatttacagtccaagattgacgagtatgatatggacatagagcttgtggatgtggcggtgtccgggagcaggtgcagaggtctggaacaggaaaattctgaccttgatgtggttgtggaataccggggcggggaaacggaggattctctgtttaatacatttaatgaggacgggttaagcatcggcggcgtgaaagttgacatcaatcctatcacagaaggaaagaccgggacgcttgggcagtatcttccgggagtggaagcgtaccttgcggaaaaacgtgctgccctgcaggagaggaatacggaacaggcacaggaagaaaagcagacagtgattacccttacagtggcagagtgcggagagttccataacctcggagaataccatgaggatatagcaagcgtggaggaagcaatcgaaattttcaaccagataccgccggagaggatgaatggtatccggagcatcggcatcaacattcatacggaagggacggaagcgtatgaggacacacagatggatattgtgtcgggcaggactgctgatctggagattttagattatgtgccggacattacagacaatccaaaagcggtagcggtgattgcggagctgatcgacaagctgccggatatagaagtgcttggc

SEQ ID NO: 667 - DNA, 753 bp, Streptococcus infantarius
  misc_feature: SEQ ID N?1614067
atgaaatcaacgaaaaaccgtgatcgcaatatcacacactttttatatgtactaccgaatctgatcatgtattcctttctctctattgttccaattgtccttgggctgtattatagctttaccaactggaacggtatcggtaagaactataaatttgtaggccttaaaaactatattaaaattttatccgacaatcgttttcggaaagccgtactatttaatatacgatatgccgcaatgctgatcatctgcgtaatgctgctgtctgttgtacttgcactgttaatgaacacaaagatccgtggtcagaactgcttcagagctatctatttttttccggcctgtgtcagtatgctgaccattggactgatcttcaactatattttctttcagggaatccccagtctcggaacttcccttgggattgaagcattacaaaaaaatattttatctggcagaagcactgctatttacggtatcctgatcacaaatatatggaaaagcgttgcaattccaacagttttagtcatttccgctttgcagaccattccaggtgagattatcgaagcagccattgtagatggtgcaaatggccgtcagcgttttttctacatcacccttcgctacattctgcctattttaagtattatttttgtccttgtcctgaaagaaggacttatgatctacgattacattatggcaatgacctctggcggaccagcaggcgcaacagaaagtatcactctttccatt

SEQ ID NO: 668 - DNA, 792 bp, Unknown
  BMI gene
  misc_feature: SEQ ID N?1615301
atggttgacgatgaagaacttctcgaactcgttgaaatggaaacaagagaattgctttcttcttacgaattcgatggcgacaacatccctgttatcaaaggttctgctttgaaagcattggaagctgttcaagctaaccctaacgtaaaaagaggcgaagacaaatgggttgacaaaatttgggaactcatggatgcagttgactcttacatcccgactcctgaacgtgacttagacaaacctttcttgatgcctgttgaagacgtgttctctatcacaggtcgtggtactgttgctacaggccgtgttgaaagaggtaaagttaaagttggtcaagaagttgaattggttggcttcggcgaaactaagaaaactacagttacaggtgttgaaatgttcagaaaactgttagacgaaggtcttgcaggcgacaacatcggtgctttgctccgtggtgttgacaaaactgaaatccaacgtggtcaagtattggctgctcctggttcaatcacacctcacactaaatttacagctaacgtttacgttttgacaaaagaagaaggcggacgtcacactcctttcttccctggttacagacctcagttctacatcagaacaactgacgtaactggttctatcaaatttgacggcgaaatggttatgcctggtgacaacgttgttatggacgttgaattgatcgctcctgtagctatcgaacaaggtatgagattcgctatcagagaaggcggacgtacagttggtgccggtgttgtagacaaaattgttgaatag

SEQ ID NO: 669 - DNA, 525 bp, Unknown
  BMI gene
  misc_feature: SEQ ID N?1617244
atacgaatcagtatcgcttctccggagcgtatactgaaatggtcatacggtgaagttacaaaaccggaaacaatcaactatagaacattgaaacctgaaagagacggtttgttctgcgaaagaatctttggacctacaaaggactgggaatgctattgcggtaagtacaaacgcgtaagacacaaaggtatcatctgcgaacgctgcggcgttgaagttactgattcaaaagtaagaagacacagaatgggccacatcaaactggctgctcctgtttctcacatctggttcttgaagggtattccttcatatctgggcttgcttttggatatgtctttaaaagatcttgaacaggttatttatttcaacaactatgttgtaatcgaccctgctgattcaggattcaaaaaatatcaattgctttcagaagaagaatacgaagacttcatcatggaaaatgaagaatctgctttgaaagttggtatcggtgctgaagctattaaagaacttctcggcgaaatcaat

SEQ ID NO: 670 - DNA, 642 bp, Unknown
  BMI gene
  misc_feature: SEQ ID N?1619505
atggacatttttggagtgttgaccttatttggaggccttgcactgttcctttacggtatggataccatgggacaggggcttgacaaggtgtcgggaggccggctggaaaagattctggaaaagctgacctcgaacccgatcaaagccgttcttttaggcgcaggcgtgacggccgtgattcagtcgtcgtcggccacaacggttatggttgtcggctttgtaaactcgggaatcatgaagctgtcccaggccgtaggcgtcatcatgggtgccaatatcggtaccaccgtcacgtcctggatcctgagccttacaggaattgaaagcagcaactttttcattcagcttttaaagccgtcgtcgttttcgccgattctggccgtcatcggcatcattttcatgatgttctcgaagaaagagcggaaaaaagacatcggtacgatcatgatcggctttgctgtcttaatgttcggaatggagaccatgagcgacgctgtgaagccgttagctgacgtgccggagttcacgggaatccttaccatgttctcgaacccgattttaggcctcatcgccggagctgtgctgacggccgtgatccagtcgtcgtcggcgtctgtcggtattctccaggccctctgcgcc

SEQ ID NO: 671 - DNA, 840 bp, Unknown
  BMI gene
  misc_feature: SEQ ID N?1621790
accctggaaggcacaatggtgatcggtgacccggaagagtatttctcccagggaaaggtcctgattgcggcggctaacccggatctgatggagaactatattgaaaagcatgatctggtgatccttgggaaccggtatgagtcgcagctctgcgccatcgagatggaggccggctgtattatcgtctgcgagggcgccggcgtttcgctcacgatccggaagctggcgcaggaacggggatgcaccgtgattacgacgcagtacgacacctacacgacggcgcgtctgattaaccagtccatgcccatcagctatttcatgaaaacggaaaatatcattgcgttttccgatgaagattatctggacgatatccgggacattatggcaagcaagaggcaccgggatttcccgattctcgatggggacggaaaatatatcggcatgatatccagacggaatcttctcggcgccaagggaaagcggctcattctcgtggatcacaatgagaaaacacaggccgtagagggcatggaaaatgcggatatccaggaaattatcgaccatcaccgtctgggaacggtagaaaccatgtcgccggtcttcttcaggaaccagcctcttggctgtacggcaacgattatttaccagatttaccaggagaatgggatcgagattgatacccagacggcagggcttttgtgcagcgccatcatctccgatacgctgctgttccgttcgccgacctgcacgtccgtggctaaaagggcagctctggagctggcggaaattgcaggcattgacgccgaggaatatgcgaaaaaaatgtttgccgccggaagc

SEQ ID NO: 672 - DNA, 558 bp, Clostridium asparagiforme
  misc_feature: SEQ ID N?1624391
aacgcccacctcggcaaaaaccggatctattcggtctgcgtaaaggaacacgaggatgcgctccgggtcttaaaagccacaaaacttctggccgacgacggggaaatcagggaaaacctgtccgtagtcggcaatgtggtggtgcagaatccctgctgccggcgggcttttctgcggggggcatttttagcgtccggttcggtcagcgatccggaaaagttttaccatcttgagattgtctgtaccgccgagccaaaggcaagacagcttcagtccattatggcaacatttgacatggatgcccgcatcgtcattcggaaacgatattttgtggtatatatcaaagaggggaaccagatcgcagacatgttaaacgtgatggaggcgccccttgccctaatggaatttgagaatatccggattctgaaggaaatgagagggaatgtgaaccgtcaggtaaactgcgagacggcaaacatcaacaaaacggtatcggctgctatgaagcagatagatgatatacaatatatcagggatacaatcggctttgaaggcctg

SEQ ID NO: 673 - DNA, 603 bp, Clostridium bolteae
  misc_feature: SEQ ID N?1625788
gtcaagttcggcggctacgtggacaccgagtgggacggccaccggaacaatttcgtccagaagggctaccagtccgtcatggcagttccctatgacatcccgattgtgggctatggcaacaacatcatcaactccctgcggatctgggacgcacagccggtcaacaccttctccttaaacgatttcgacaagggcgattaccagaaggctgtggagcaggagaacctggcaaagaccatcgtagaggtgctttatcccaacgacaaccactatgccggcaaggagctgcgcttaaagcagcagtatttcttcatctccgcaagcgttcagcgggctgtgaaaaaatataaggaaaaacatgacgacatccataaattctacgagaaggcagtcttccagatgaatgacacccatccgagcgtggctgtggccgagctcatgaggattttggtggacgaagagcatttggagtgggatgaggcatgggagatcaccacgaagacctgcgcttacacgaaccacacgatcatgtccgaggctctggagaaatggcctattgagctattctcccgtctgcttccgcgtatctatcagatcgtggag

SEQ ID NO: 674 - DNA, 1407 bp, Unknown
  BMI gene
  misc_feature: SEQ ID N?1626208
gcggatgagagccggacggacaaaaccatctgccttgcggttacgccctcactcaagagctatggcatctcagggcgcggaaggctgtttgaagttaagcagcgtgtcaaggaggccaatgaaggacggcggcatgacgcaccggggcatcgtctggaaggctcgtcacacttcttctcagaactgcaagcaaatccgtctcttgccgttgacttcatcattgcaccgccgcgtatggcatactacatggagtacagcactaagatatacgaggtttacatgaaatacattgcgccggaggacatcatcgtctactccatcgacgaggttttcatggatgtcacggactacctcaatacctacaagctgtcaccccatgacctcgccatgaaaatcattctggatgtactttcgactaccggcattacagcaaccgccgggatcgggacgaacctgttcctctgcaaagtcgcaatggatattgtcgccaagcacatccccgcagacaagaacggtgtacgcattgccgagctggatgagatgagctatcgcaagacgctttggtcacaccagcctctcactgatttctggcgggttggccggggctatgcgaagaaacttgaagaacatgggatgttcacgatgggtgatgtcgcccgccgctccattacggatgaggacttgctgtataagctttttggcaagaacgcagagcttctgattgatcacgcatggggctgggaaccctgcacagtcgaagctgtcaaagcatacaggccgagcacaaacagcttaggctctggtcaggttttacattgcccgtatgaagcggagaaagcaaaactcgtcctgcgagagatggccgatctccttgtactggatttggtagataaggggcttgtcaccgaccagcttgttattacggttggctatgatattgaaaatcttaccgaccctgagcggcgaaaaaaatatcatggggatgtagtcaaagaccattacgggcggcaaatacccaaacacgcacatgggacaatcaatctcggtggacacacatcctctactaaaaaaataatggaagcaacggctgaactgtacgaccgtattattgacaaaaacctccttgtccgaaggctgaacattgtagcaaaccatgtgattgatgaagcatctgccccaaagcgcggcggagattttgaacagcttgacctcttcacggactacgctgccgtcgaggcagaacgcgaaaaagaaaatgcggagcttgagcgtgaaaagcgaatgcagaaagccatgctgtcgattaaaaagaagtttggcaagaacgccatactcaagggcatgaacttggaagagggcgcaacagctaaggataggaatgagcagattggaggtcataaggcatga

SEQ ID NO: 675 - DNA, 390 bp, Unknown
  BMI gene
  misc_feature: SEQ ID N?1626640
atgaaaatcaagcgtgaagagatcagaaatgtggcgatcatcgcccacgtagaccatggcaagacgaccctcgtggatcagctcttgcggcagagcggcgtgttccgcgcgaaccaggaggtcgtggaccgtgtcatggactccaacgacatcgagagggagagagggatcacgatcctctccaagaatacagcagtatcctataacggcgtaaagatcaatattgtggacacgccaggccatgccgacttcggcggcgaggtggagcgcgtgcttaagatggtagacggcgtcatccttgtggtggatgccttcgacggcccgatgccccagacgaaattcgtccttcagaaggcgctggagctggatcttcacgtcatcgtctgcatc

SEQ ID NO: 676 - DNA, 615 bp, Unknown
  BMI gene
  misc_feature: SEQ ID N?1627407
atgacgattatgaaaaagaaactgatggttttgctggcggtatgtgcgctggcggcggccgtgacagcatgcggctccaaaaacaacaatgagacgacggcagcggccacgacggcttccgcagaggagacagaaaaggaaacggcaaaggaagaaaatgccggcagcgaggcagcaacggatgcagaagaagagacgaaggagacgatggacgctgaacttgaggcgcagggaccgggcgccgcagaggaacaggaagctatcgagcagaatcagaactttactgatctggaaaactccgattatactggttttgcaaaccagatcgtcgaggccgtgaaggcaaaggacatgaatgcgctggctgacctgatggcgtatccgacatatatttcctgcgtccaggaaaatgacggcgtcgtagagagcaaagaggcgtttttagccctggatccggagatgatttttaatgcagagctggtagatgcgatttctgcggctgacctttcggatctggtgccgttaatggcaggcgttgtgatcggtgacgatacgcccaacattatttttaattccgtggacggcgagcttgggatcgtggggatcaactactaa

SEQ ID NO: 677 - DNA, 813 bp, Catenibacterium mitsuokai
  misc_feature: SEQ ID N?1627820
atggccttcagcatcagcattgtcgtgccgttcctaaacatgacgaagcagtttgcaggcgccatcggccaggtttccaaccagatcaacatggtaatcatgggacttgcaggcgcccaccgcatcttcgccctcttagatgaggaaccggagaaggacgagggctatgtcacgcttgtaaacgccagggagaatcccgacgggacactcactgagtgcgaggaacgcacccatatctgggcatggaagcacccgcaccacgacgggacgctcccctacacccgcctgcgcggcgacgtgcgtttttatgacgtggacttcggatatacgccggagaaaaccgtcctgcacgacatctccctttacgccaagccgggccagaaggtcgctttcgtcggctccaccggcgcaggaaagacgacgattaccaacttaatcaaccggttctatgatatcgaggacggaaaaatccgctacgacgacatcaacatcaacaagattaaaaaggcggatcttcgccgaagcctcggcatcattctccaggataccaacctgttcaccggaacagttatggacaatatccgctacggaaagctggatgccaccgatgaggagtgtatcagtgcggcgaagcttgccggtgccgatgactttatcacccgtcttccggagggctacaacacgatgctcaccggaaacggcgccaacttaagccaggggcagcgccagcttctcgccatcgcccgtgcggctgtcgctgacccgcctgtcatgattatggacgagggggcaagctccatcgacacgcgtacc

SEQ ID NO: 678 - DNA, 726 bp, Unknown
  BMI gene
  misc_feature: SEQ ID N?1628630
atgaaatcctttcctgcctggcagaaagctagaaaggggggatttcgggtgattgaaaaaatgaagtttatcagcatctccgggccgaaggacgacttagaccgtatggtaaaccagaatctctcccactacgagatccagtttgaaaacgccatgacggagctgcgctctgtggcaaagcttgtcccgtatccgggggaaaatccatataaagagccgtttgcaagcgcaaaaaagctccttgccctctatcccgattccaaggacttccatataaccggaagcttaaaaatttccgaggccatggatatcataaccgaggcaaaaaaggagacggagaatttttcttcggaggcggaatctctggaaaaacgccggaaagagcttcaggaactgctcgaccaggtgcttctatttaaggagctggatttcaacatcccggtgatcttaaaattccagcacgtcaagttccgtttcggccgcatccagagggagcttttcccgcagcttgaggcctttgcggaaaactccgacgacacgattctctgcaaatgccatgagacggatcagtatgtctcgcttttatattttacgccgtccatcgtctccgagcgcatcgacgcggtgttttcctccatgcagtttgagcggattttcctgccggatcagtatgacgggacgcccaccgaggaaatttccaggctggaaaaagagcttgccgagacg

SEQ ID NO: 679 - DNA, 579 bp, Unknown
  BMI gene
  misc_feature: SEQ ID N?1629280
acttttgatgacgtgctgttagtcccggcgtattccgaagtaattccgaatcaggtcgatgtttctacatacctgacgaaaacagtaaaactgaacattccttttatgagtgcaggaatggataccgttacagaacaccgcatggcgattgcaatggcaagacagggcggcatcggtattattcacaaaaacatgtcgattgaggcgcaggccgaagaggtcgacaaggtaaagcgttctgagaacggtgtcatcacagacccattttatttatccccggagcatacactgaaggacgcagacgagctgatggcgaaattccgtatttccggcgttccgattaccgagggacggaagttagtcggcatcattacgaaccgcgacctgaaattcgaggaggactactcgaagaagattaaggagtgtatgacttctgagaatcttgtgacggcaaaggaaggcatcacgatgatggaagccaagaagatgcttgcgaaggcaagagtggagaagcttccgattgtcgacgacgattttaacttaaaaggcttaattaccatcaaggatattgagaaacag

SEQ ID NO: 680 - DNA, 144 bp, Unknown
  BMI gene
  misc_feature: SEQ ID N?1629624
ctttatggtcgtgctgctcgctacaagccacacagaaaaggatggataggattcccagaaagattattcgcattaccgattgatatttactttatttcaagctacgaagatagcggtttaatcggttgcatcagtgcttattaa

SEQ ID NO: 681 - DNA, 168 bp, Unknown
  BMI gene
  misc_feature: SEQ ID N?1635112
gtgagagaaattgttgatttaatgaaagagctgcttcttataaaagaagaaaaaagtacaatggtaggcttgagcggtttcaaaagaaaacccaaaccaatgctgaaaagacccaaaaagaaagaaaacaaggaactaaaactatccgatttgatgagaagagcttaa

SEQ ID NO: 682 - DNA, 1125 bp, Moorella thermoacetica
  misc_feature: SEQ ID N?1639469
gatcccggaacgggaaagcagatccagaaatccgtctatggcaagacgcagaaggaggtaagacaaaaactcacggcaatcactgcggaaatcgacagcggaacgtttacccaagaggacaagacaacggttgaacagtggctcaatatctggttagacgaatacatgggcgataaaaaatacggaacgatacgaaactacaaaaatgcctgcaggtatcatattattccgtatatcggtcaatgccgtttatccgatctgaagccgcacatgattcaaaccctatataacaggcttcaacgcggagaagacgacaagccacccctgtcaccaaaaaccatccgcaatgtgcatggcgtcctcagcaaagcactgaatcaagcagtgtggaatgaaatgatccgctcgaatccggcacagttgaccactctcccacgcaaagagcaaaaagaaattgagactctttccgacaagcaaattcaacagttttccatgttagtcgagcaggacagctatcgtgccattttgaaattcattcttttcagcggcgtcagagagtcagaagcaattgggttgacgtgggactgtattgattttgaccgaggtacgatccgtgtctatcatcagatgttaaagcgtaccaaggaagcaggtggttatacgttggcgtcccttaagaatgacaaagagcgtctgctgactccgccgccgatgctgatgactatgctgaaagagcagaagagggagcaggtggagcggcgtatgaaagctggcccagcatggcatggatggaattctgtagaggagcagaaaacgtggtttgtctttacgacagagtttggtgaccactactgcccgcagacggtgtacgcacatttcaaaaagatcgcaaggcaaatcggtgcggagaaggcgaatgtccatagcttgcgccatacctatgcagtgctctgccttcagaacggtgatgatgtgaagaccgtgcagtcaaatcttggccatgcaacggcagcatttacgctggatgtgtatggccatgtctctgaaaaaatgaaacaagacagtgcaaaccgcatggaagcctatatgcggggcactgtctatggaaagacccaaaacggttaa

SEQ ID NO: 683 - DNA, 459 bp, Unknown
  BMI gene
  misc_feature: SEQ ID N?1667205
atgaaaataacatatacatcaattttatcggcaatatgtagttcaattttgctattggtttttttgtcggtttatatatggaaaaagcaagaaaattatagcttgtatgaagtaaaattacttattttttgcactgtactaacaggagtaagattattttttccaatagatatttgcggaataagtcatacgataggaataaaaatattatatccagaactttgtcgctttatgcgggggaaaataggatttttaagtcatttttctgtactttttttgattagtttacttggaagttttcttatcttagtgcaaaaaagtttatcatatatatcatttataaaattaataaaagaaataagaccgatagagtatattcgtgttaaaaagtataaaaaagtgaaaaaaataccaatattgaaagttgatagtatagaagatccatttattgttggtata

SEQ ID NO: 684 - DNA, 135 bp, Unknown
  BMI gene
  misc_feature: SEQ ID N?1675394
gtgatccatccccacgttctcgtagggataccttgttacgacttaaccccaatcaccagtcctaccttaggcgccgccctccttacggttaggctaacgacttcgagtattaccggctctcatggtgtgacgggc

SEQ ID NO: 685 - DNA, 1086 bp, Unknown
  BMI gene
  misc_feature: SEQ ID N?1680948
atgacgaaaatagatattttttccggtttcttaggagctggtaaaacaactttgatcaagaagttactgaaagaggcaatggatgcttctaaagtagtgctgattgaaaatgaatttggtgaaattggtattgatggcggttttttaaaggaagccggtgtagaaattaaggaaatgaattctggatgtatctgctgttctttagtaggtgatttcggaacttctctggcagaagtactggataagtatcatcctgagagaatcctgatcgagccatcaggtgtaggtaagctctcagatgttatgaaggcagtacagaatgtaaaatctgatgtagatgtacagcttaacagcgcagttgtagttgttgatgcaaataagtgcaagatgtatgcaaagaattttggtgagttcttcttaaatcagatcgagcatgcaggtacaatcattctgagcagaactgcagatatcagtgaaagcaagctgaatgctgcactggagatcatccgtgagcataacagcaaggcaacagttatcacaactccatgggatgaactggatggtaggaagattctggagacaattgagaatgccaaggatctggaagctgaactgatggaagaggttgccaagcttcatgatgaacatgagcatcatcatcatgaccatggtgaggactgcacatgtggctgccatgatcacgaccatgatgaggacgagcatgaacatcatcaccatgacgaccatgatgagaactgcacatgtggctgccatgaccacgaccatgagcatcatcaccatcaccatgcagatgagatattcacaagctggggtatggagacacccacagcctataccaaggatgagatcgagacaatccttaaaaagctggatgatacagacacttacggcgtaatccttcgtgcaaaaggcatgcttccttctaatgatggaacatggatcaattttgactatgtaccggaagagagcaatgtcagaacaggagcacctgaagtaacaggtaagatttgtgtgattggttccaaattgaacgaggacaatctgaaagcattgtttacaaaataa

SEQ ID NO: 686 - DNA, 231 bp, Unknown
  BMI gene
  misc_feature: SEQ ID N?1683707
atgtacccatctcgcacttgcactttatttataccttctcatattaaaaaagaccccttggtggagtctcttttatttacgcgagaagggattcgaacccccgaccttttggttcgtagccaaacgctctatccaactgagctactcgcgcttattttagtcggtttacaagtttttatccttgcaacatcttcaagtctatcaaaaaaagatttattttcaagtgcttaa

SEQ ID NO: 687 - DNA, 708 bp, Unknown
  BMI gene
  misc_feature: SEQ ID N?1684336
gtgttgccattagtgtcagttgtagaaagcaaggcttttgagtatgctgatagaactgtaaaaattacgggacagacggatgttactgtcaatctagaagagtatgaccaatctgcaacagaagaatggaatactgaatataagtggtttaatgccgcagtaaaaacaaaacctaatgtatggggtgtagcatataagcaaggaatggattgttatttaattgataacaaaatgcttgtattatctggcggacattattataaagttgttgagtctgaaactaatatagatatgtatcgtttcttgcatgctgctttaaatggagatccaatacagtttatgctaaaaaagggtaatgattattcagattttttaatgacctgtcaggaatatatgatctatatgactaatcttgggaatatgattgaaagtacagaggtaagtgactattggaggttggctattctttacagccttggtttaactaacttagatgcaaataaattaaagtacaaaactttaacattggacgatggacaagagtttaaagtcttagatacatcagaagatattgtattagtgtcaaaagtagccgctacaaatgatagtattaggctttcagaggtaaagggtaaaccagctatcttatatggctcaacggatataactaacacattacataaagagcttcatgatatcacacctatt

SEQ ID NO: 688 - DNA, 1047 bp, Eubacterium siraeum
  misc_feature: SEQ ID N?1688733
atcggttacggcagccagggtcacgcacatgctcttaacctcaaggaaagcggcgttaaggttatcatcggtctttacgaaggctccaagagctggaagaaggctgaagaggctggtttcgaagtattcacagctgctgaggctgcaaagagagctgacctgatcatgatcctcatcaacgatgagagacaggctgacctctacaaggagagcatcgctccgaacctcaccgctggcaagacactcgcatttgctcacggcttcaatatccacttcggtcagatcgttcccccggctgacgttgacgttatcatgatcgctcccaagggcccgggccacactgtacgttctgagtaccagatcggcagaggcgttccctgcctgatcgctgttcaccaggacgctaccggcagagcactcgacactggtcttgcttatgcagccggtatcggtggttccagagcaggcgttcttacaaccacattccagtgcgagactgagaccgacctgttcggtgagcagtgcgtactctgcggtggtgtaactgccctgatgaaggctggtttcgagactctggttgaggctggttatgatcctcagaacgcttacttcgagtgcattcacgagatgaagctgatcgttgacctgatctacaagggcggcttcaagatgatgagatactccatctccgatactgctgaatacggcgactacgagatcggcaagcgtatcatcaccgaggacaccaagaaggaaatgaagaaggttcttcacgaaattcaggacggtacattcgctcgcaactggatcacagaaaacaagatgggcagaagccacttcaatgcttgccgccgcatcgagagcgagcacctgcttgagaaggtaggcgctgagctgcgtaagctctacagctggactgacgatatcgacgttgcttccggtactggcgcagctgctcccgcaaagaaggctgctcccgctgctaagaaggcaccggctaagaaggctcccgctaagaccgctgctaagaagaccacaaagaagtaa

SEQ ID NO: 689 - DNA, 603 bp, Bacteroides pectinophilus
  misc_feature: SEQ ID N?1692792
atggtggcaaaggcaagtattattgagatttacgcaagggcagatgctgccggaagggtggatatcatctgtatgaattattcgaattttattggaatcgtagatggctacacggaatggcttcgctacatgattgagagtgaaaaagcttataaccgaaagaaaaatcatggagatctgggagtatgggtgcagacatcgggcattcatagtgatattacggcggatacggcaatcagtaatgtcatcacccgagacgcgattattgcctgtgatttttccggagatgtactggaaggtgttgaccgtggcgaaaaatatcggaaggatgcatacacgcttcgcagaatgagggcagattatgaacttttcaatcagcaactgtgtattctgggaagaaacgagttaagaatattcagagggtatctttccggggagaaggatatcggagagatcgcagaagaggaagggattcagtatgaatccgcggcacagagggtaagacgtgcaaaggtaaagatcaaggttcagatggagataaaaaagactgcaattgtacctgttttggtaaaaaagacccgtgattgtcactttcgacattaa

SEQ ID NO: 690 - DNA, 120 bp, Unknown
  BMI gene
  misc_feature: SEQ ID N?1704961
aaaccgcagtcagcctttcggctgactgcggttttatgtatcccttatggcttacacgcgttcaaagcgctgctccagctgacgcagcaggaagccgtggtgatcgatctgccgcgttaa

SEQ ID NO: 691 - DNA, 117 bp, Unknown
  BMI gene
  misc_feature: SEQ ID N?1706327
ttgcgcccttttttacgtctgtacggctcgcgtaggcgggcgggtacagacgtttttttcatgcaaaaggaggaagaaaagatgaaaaaacgggtgatctctctgctgctggcgctt

SEQ ID NO: 692 - DNA, 1458 bp, Unknown
  BMI gene
  misc_feature: SEQ ID N?1711948
gaggcgtatgttccacagagtgatacttatatagcaaaggactcttcgattaatgatgagatagataagttaagacattcggcaacagcggcgctgtcagagagagatgatgttattatagtagcatcagtttcgtgtatatatggtctgggtgcgcctattgattataagaatatggttatctcgcttcgtccgggtatggagaaagacagggatgagatgataagaaagcttatcgacatacagtatatgcgtaatgaccaggactttaagcgaggtactttcagagtaaggggagatgttgttgagatatatccatcggcatcgagtggtgatgcagtcagagtggagttctttggtgatgagatagaccggataagtgaaatagactcacttactggagaagttaagtgtaaccttgaccatgttgctatatttcctaattcgcactatgttgtagagaaagagaagatgaacaaagcgattgagaatataaaggaagaacttgcggagaggataaagtattttaagagcgaggataagcttcttgaggcgcagagaatagaggagagaactaactttgatagagagatgatgcaggaaacaggcttctgttcgggcattgagaattattcaagacatttggcagggcttccagcagggtgtccgccgtatacacttatggactattttccagatgattttatgataattgttgatgagtcgcacattactattccacagataaggggaatgtatgcaggtgaccaggcaagaaagacgacacttgtcgattatggtttcagacttccttctgcaaaggataacagacctcttaactttcaggagtttgagggtaagatatcacagatgctttttgtgtctgctacccctagtaagtatgaggaagagcatgagctcatgagggcagaacagattataagacctacaggacttcttgacccggaaatatcggtaagaccaatcgaaggtcagatagatgaccttatcagtgagattaacaaggaagttgagaagaagaataaaatacttgttacaacacttacaaagcgtatggcggaagaccttacagattatcttaaggaggtcggcataagggtaaagtatctgcatgcggatattgatacacttgaaagacagaagattataagggatatgcgacttgatggttttgatgtgcttgttggtattaatctgctaagagagggactggatattccagagataagtcttgttgctattcttgatgctgataaagagggcttcttaagaacagaaacttcgcttatccagacgataggaagagcagccagaaatgctgaaggacacgttattatgtatgcagatacgataacagagtccatggaaaaggctatatctgaaactgaaagacgtagaaagatacagcaggagtacaacgaagcacacggaataaca

SEQ ID NO: 693 - DNA, 798 bp, Unknown
  BMI gene
  misc_feature: SEQ ID N?1717525
ctaaaaagagtatgtcaaaacatttataaatacaataacccaggtcagttatctgacacaaatggttacaaaatcaatgaaatgaaggatggctcacgtgtagttgttgtaagaccaagtatgtcagaaacatgggcattcttcgtaagaaaattcgacgtaaaaagagcaacactagaacaaatagttacagcagatggaaaagaagaagcaataaatcttttaaaatacctagtaaaaggtgcaagaattatagcacttactggtgagcaaggttgtggtaaaacaacaatgcttatggcaatgattgaaaacatatatgaaacaatgaacttacgtatcacagaaactgcattcgagttgcacttaagaaaaatttatccaacaagaaacattttgtcaatgagagaaacagaaacaattgcaggtcaggaatgtttggacgttcaaaagaaaactgatggtagtgttaacataatcggtgaggttgcaacagatcccgtagcatcttggatgattcaatcagcacaggttgcatcaaaattcacattgtttacacaccacgctaaaactttccctaacttagtaacagcattaagaaactcaatgctaagagcaggaacatttacagatgaaagaattgcagaagaacaggttataagtgtattaaactttgatatccacttagtaaaggactttagaggaagaagatacatagaaagagtaacagaatgtattccaattgaggatacagaagattacaattatgattacagaaaagaaaaaacattagaagga

SEQ ID NO: 694 - DNA, 627 bp, Clostridium scindens
  misc_feature: SEQ ID N?1719136
atgattcgttcccatgtactgatgtgcggcggcaccggctgcacctcgtccggcagcccggcgctgatcaaggccatggaggccgagatcgccaaaaaaggacttgccgatgaaatcaaggtcgtgcagaccggctgcttcggcctgtgcgccctcggccccatcatgattgtttatccggaggggaccttttacagccgtgtgacgatggaggatatccctgagatcgtcgaggagcatctgctcaagggccgcgtcgttgagcggctggtctataaagaccccgctgaccccgaccatgagggcgacgtttcgctgggcgacaccgctttctacaaaaagcagaagcgcgtggcgctgcgcaactgcggtgtcatcaaccctgaggtcatcgacgaatacatcgcgatggacggctatatagctctcggcaaggtgctgaccgaaatgacgccggagcaggtcatccagaccatcaaggactccggcctgcgcgggcgcggcggcggcggcttcccgaccggcgtcaagtggagctttgcggctgccaacaaggcggacaagaaatatgtcctttgcaatgctgacgaaggcgatcccggcgctttcatggaccgctcggtgctg

SEQ ID NO: 695 - DNA, 1227 bp, Faecalibacterium prausnitzii
  misc_feature: SEQ ID N?1727799
gataaggccatcgacctgctggatgaggcggcggcctgctgtgcgctgcgccacaccgagctggccgactatcaggtggccatgaagcgcatctccgagctgacggcggccgaggaggccgatgccgataagaccgacctgaccgacgaggattacgccgccgcggccgagcgccgcagcgagctgatgcggctggaggaaaagaccaatgcgctgcgcccggccgtcgaggctatcgaggtgacgggcgacgatgtctcccgcgttatcgagctgtggacgggcatccccgccgacaagatcgagcagagcgagtatgacaagctggccgcgctggagggcgagctgaaaaaacacatcatcgggcaggacgaggcggtcagggccgtcgccgaggccgtcaagcgctcgcgcgtcgggctgacggcgcgccgccgtccggcttccttcatttttgttgggccgaccggcgtcggcaagaccgagctggtcaaggtgctggccggcgagctgttcgatggggtcgatccgcttatccggctggatatgtctgaatatatggagaagcataccgtggcgcggctgatcggttcgccgcccggctatgtcggctacgatgaggccggacagctgaccgaaaaggtgcgccgccgcccctacagcgtggtgctctttgacgagatagagaaggcgcatcccgacgtgctgaacattctgctgcagatccttgatgagggccgcgtcaccgacgcgcagggccgcaccgtcaactttgaaaacaccgttatctgcatgaccagcaacgccggcagcagcgataagacgggcaccgccggctttggacgcacggcggaggatatgagccgcgagcgcacgctcaaggcgctgtctgattttctgcgccccgaatttctcggccgtgtcgatgaggtcatcgttttccggcctctcagcgccgaatcgctgcgccgcattgccgcgttgatgctcgatgagatgcgccagccgctggccgacaagggcattgagctggcctacaccgatgaggcgctggccgctatcgccgagaagggcgggaacggccggtcgggcgcgcgcgagctgcgccgcatcatccggcgcgaggtcgaggatccgctggccgaccgcatcatcgaggccggctccgccagccgcatcaaaaaggtgacgatcgacgccgaaaagggcgagctcgtccttcgataa

SEQ ID NO: 696 - DNA, 540 bp, Bacteroides capillosus
  misc_feature: SEQ ID N?1733925
atggcgtgcccctggtacaccggcagcggcaccgtggacaatgcgaagaacgagctcttcctctccgtccgtgagaacatgaaggtccgccgcttcgagcgcatcgagggcaagtgcgttccttatgtccacatgaagggcaaggtcgccgtgctcgtcgagcttgagaccgaagcctccgccgaggccgtcaccgagctcggccgcgacgtcgccatgcagatctgcgcgctcaacccgcagtatctcgacgagagcaacgtccccgccgccgacgtggagaaggaaaaggagatccgtatcgccaccgcgaagcaggatccgaagaacgcgaagaagcccgacgccatcatcgagaagatcgtcatgggcggcatcggtaagtacttcaaggagatctgcctgctgcagcagccgttcgtcaaggacgacaaagtctccgtcgaggatcacatcgccgctgtcgcaaagcagatcggtgcctccatcaagctcgtgggctacacccgctttgagaagggcgaaggcatcgagaagaag

SEQ ID NO: 697 - DNA, 219 bp, Desulfatibacillum alkenivorans
  misc_feature: SEQ ID N?1736158
gcagcactaaaagaagccgggttcttcgctaaaataatagaagtattggcggtggaagtagaagatactccgggggcgctgctttccatactcgaaaaggcatcggcagccggattgaatatagaatacatgtatgcgcttacccgtccgtttaaagacaagcctgtaatggtaatgtcttttaaggacattgatacggcggaaaagttattgtcgtaa

SEQ ID NO: 698 - DNA, 516 bp, Clostridium phytofermentans
  misc_feature: SEQ ID N?1749372
gacccgctgccggtgcagatcgggcggttctggtggaatgcactgcacggcgacctcggcgtcagccatatttataaggtcaatgcgcctgtgaccggcatcctggccaaaaaactgcccatctcggtgcagatgggtgttttctccatgctgctgagtctggtcgtcggcatcccgatgggcctgttcatgggccggttcaagaaccgctggccggataagatcggcacggccatcatcgtgctcatccaggccgtgcctgccgccgtgtattatctgtacatccagatgtacggcaccaccgcgctgggcgtcggcctgctgttcgatgcctccaactggaaatactgggtgctgcccatctgctccatgagcctgggcaacgtggccttctacggcatgtggctgcgccgctacatggtggatgagagcaacaaggactacgtccgcctggcactggccaagggcgtgagcgaaaacaacatcgcgctgcaccacatcttccgcaacgccatg

SEQ ID NO: 699 - DNA, 486 bp, Unknown
  BMI gene
  misc_feature: SEQ ID N?1751361
atgagtcagattaaagaaagttcactggaattaatcgggggaacaccgattttaaaattaaaccgttacacagagaaagcaggaattaaggatgctacaattttggcaaagcttgaatacctgaatccggcaggttctgtaaaagacagaattgctcttgcaatgattgaagatgcagagaagaaaggcttattaaagccgggtgcaacgattatcgagcctacatcaggtaataccggtatcggtcttgcagcagtagcagcagcaaaaggatatcatgcaattcttacactgccggataccatgagtattgaacgtagaaatcttctgaaagcatatggtgcagaactggtattgacagaaggtgcaaaaggaatgaagggtgcgattgcaaaggcagaagaactcaaggaatccattcctggttctatcgttctcggacagtttgtaaaccctgcaaatccacaggtacacagagaaaccaca

SEQ ID NO: 700 - DNA, 102 bp, Unknown
  BMI gene
  misc_feature: SEQ ID N?1751890
atgttgtggacgataagtctgtgtaagcagaccaaaaataaaaaaagaaatggaggaagaaagatgttagtatcagcagaagaaatgctcaaaaaagcaaaa

SEQ ID NO: 701 - DNA, 219 bp, Unknown
  BMI gene
  misc_feature: SEQ ID N?1753439
gtgttcgagacaaagaatgcgatcgcaaatggttcatctgagattgacatggtcattaacattggatttttgaaagacggaagatatgaagaagtagaagaagagatcaaagcagctggtggaatttcaagttttgatgatgcagaaaaattcattagtcttggagcgagccgtttgatcaagatcatgaaaaatacagacaatggtgcaggatactaa

SEQ ID NO: 702 - DNA, 432 bp, Unknown
  BMI gene
  misc_feature: SEQ ID N?1755262
gtgtataaaatgtttaaacctgattctatcagacctatagctttaggtattgcaaaaaaaggcaacaaaattttagtcggcatcggatatgacaaagtaaagaaacaaaccttttaccgtgccttaggtggaggtatcgaatttggcgaaacaagtaaagatgctattaaacgagaatttcaggaagaaattctcgtagatattacagtaaatgaccttcttggcgtaatagagaatatttttacctatcaagggaaaacaggacatgaaatcgtatttctttattctatagaaattccagaggatacttacaaagatgaatatgaaattgatgacgaggctgatgagtataatgctgtatgggtagatattgatgattttaagtctggtaaaaagattatctatcccgaagaatttttaaaatatatctag

SEQ ID NO: 703 - DNA, 342 bp, Unknown
  BMI gene
  misc_feature: SEQ ID N?1760276
atgtttattataacctattttaaacaaaaaacaagtgaggttataatgatagaatgcacagtaaacggacataaatacgaaacatcaccgctgtattttgaggattttacaacactgggctttatgacagaggaaaaggtttatccctttttaacctgtctgacagcgtgcatagcaaacaacctttccgatgcggaacttttaaaggcactttacgtcagctgcaaggatatttttaatagagaagatttaaagtttatttccaatcttgtgttgaatcgtgagcacatgacaattgacggcaagaaacctgatcaggcagcgtgggaaaaacactggcag

SEQ ID NO: 704 - DNA, 864 bp, Unknown
  BMI gene
  misc_feature: SEQ ID N?1762115
ttgtgttttttaggaggttatatgatttataaagaattagttaattggattatgttagcggaatataaaaaaattacaaataaaaagaaaatagagttattacataattatgagaatataaatgaaatatgtagtattttaaatttaaatcaggaggaaaagatagataaatacattaagtatatgcaagaaaaaaatatacaagttataacttattatgataaggattatcctaaacaactaaagaatttatatgatgcaccaattgcaatatatgcaattggaaattgtaaaattttaaatagaaaaaataaaattgctgttattggcgcaagaaaagctagtaactatggtataaatattgctaggcaaatagggagttttttatctaagaataatattcatacaataagtggcctagcattagggattgacgttaattctcatttaggagtactaaaagaaaattcagtaaatagcacatcaggtagggcaatagctgttataggaaatggattagataatatatatccatatcagaatagagaaattgctaaaaaaataataaataatgatggttgtattatttctgaatatattgtaggtaccaagccattaaaaaataattttccagcaagaaataggctaataagtgctttggcagataaattggtagtggtagaagcagaaaatgaaaaaagtggaacaatgataacagtagatttttctttagaattaggaaaagagatatatgttgttccaggtaatattaataataagatgtcggtaggaacaaatagattaataaaagatggtgcaaagattataactgaatttaatgatataatagatgaagattattaa

SEQ ID NO: 705 - DNA, 723 bp, Unknown
  BMI gene
  misc_feature: SEQ ID N?1762189
gatatgaaggaggggacaatgcggattttaatttgtgatgatgatgttatgattcaacgggaactgacaaaatatctttccgaatattttcacagacataacttgagattaccggacatttgctgctttcataccggacatgatcttttattggattccggaaataaagacattgtttttttagatgtggaaatgcccgggttaagcggcatttccgttggcacctctcttaaaaaatccaatccggatgtcatcatttttattgtgacttcttattccgaatatcttgatgatgccatgcgttttcacgtttttcgttatctgagcaagcccattgacaagcagcggctctttcgcaatttgaaggatgccttatcactgtatcactctttacatataagaatcccggtcgaaaccagacagggaatttattccattccggcagccaatattgtctgtgtggaagccgatcagcgaaaagtaatcatacatactaccacggatcattttctttctgttcacacgattcaatattggatccagactctcaccatgaattgttttatccagactcaccggagttatattgtcaatatggcacacattacacattttgatcatcagctcatttattttgatataaacctcactgcatatttaacaagaagaaaataccgggtctttaaggaagcctatttactctatttagaaagcatccaataa

SEQ ID NO: 706 - DNA, 603 bp, Unknown
  BMI gene
  misc_feature: SEQ ID N?1767918
atggttcaggatttcgtcgaaagaaaacacggacgccagaaaattgaatacgcgcaccctgatttggtgccgattttgaaagatacatacggcacaatcgtttatcaggaacaaatcatgcagattttccagacactggctgattatactctcggcgaggcggatatggttcgccgtatgatgggtaagaaaaaactcgacgaaatggcgaagcaaaaagacaaattcatcgagcgcgccgcaaatcacggaatgagctcaaaagatgccgcaacgctttttgaacaaatcgaaaaattcgccgcatattgctttaaccggagccattctgccgcatacgctttcgtagcttatcagacagcctaccttaaagcgcactatcctgtagaatatatgtccgcgctgctttccagcgtatcaagtgaccaggaaaaaacccagctttacatcgcagaatgccagaaaatgggcataaaagttctcgcgcccgatatcaacaaatccagcgcgcatttcacccctgacggcggcgatattcgtttcgggctggcctcaattaaaaatgtcgggcaggctgttattgatttgattgaaaaagagcgc

SEQ ID NO: 707 - DNA, 117 bp, Unknown
  BMI gene
  misc_feature: SEQ ID N?1767998
aacgcccgcagcggagcgcagatccactttctcgaccaagatgacaaggagatctatttttcctgtacacgctggaaccacaaaccaaaggaggctgcgtatgtaccccacccgtga

SEQ ID NO: 708 - DNA, 744 bp, Bacteroides capillosus
  misc_feature: SEQ ID N?1768609
gtcatttacagcaccgggtacacccaggtccagatcggcggggcggcggtgtccaagcgcctgcggctgcttctgggggataagctcaagaagatccccctggcccgcttcacccaggggcaggttgggcagtatgtgaacaccatgaccagcgatgtgggcagctatgagaaaattctgacccattccagtgggaacattatcaaaaacgccgcgctctccgcggtgctggttggctttgtatgcaccgtctggctaccggcggggctgatcctgctggcggttgtcgcgttgctgattcccgacctgtggctgtccttccgggtggtaaaggtgtacggcgtggcgaaaaacaaggtcagcgccgagacggtgagtggcattgtggagtacattgacggcattcagatgttccgggcgtacaacatgggcggcgtaaaaaacatgaccgtgacccaggccatggaggagttcagccgggtgtgctaccagtacgaagccaagggcatccccatcggattcggctacaatatcatcagctggggcagcgtgccgcttatcatggtgctggccgccgggccatgggcggcggggacactgagcggcgtggactatctgatgctctccatgctgcccattttgctgaccaagctcaccgccagtattgccattgatctctttgaatggaagcacctgatggtctccaaaaggaacattgagaatctgattcaggagccggaggag

SEQ ID NO: 709 - DNA, 1218 bp, Unknown
  BMI gene
  misc_feature: SEQ ID N?1776073
atgccaagcgtaggaaatacaacccttatcccatatggagatgcaactttgcaggatgtaatcacaggtgttgaaaacgacgctgacccgataagggcatatttcaaggtcaagacaagctcgggcaacctaaagcttgtcaaaacctccgaggacggcaatgttgcaaatattgagtttaccgtaaaaggcgatggttacagtaagacagttaagacaaactcaaaaggtgaatttgaattaaccgacctcgttcccagaaaatacacggttaccgagcatactccgacagagtatgccgaacaaaaatcaaagaccgtaaatgttgaaagtggaaaaacggcaactgtatctttcagtaatgtccttaaaaagtggaatcttactgttaaaaaaacagacgctgaaacaaagtctgcacagggtgatgcaacacttgcaggagcagtttacggaatctacaataacggcaagttggttgacaagtacaccaccgataaaaacggcagttttacaacttcatactatgtgtgcggagataactggactttgaaagaaattgagccgagcgagggttatctgcttgacgaaaccgaatatcatatcggtgcagaggcgaaaaaatatacacttgaaaacaacagcgtttcaattggagtaaccgaagatatactgaaaggaaaaattgcaatcataaagcacaccgatgacggcagtacgaaaattgaaactcccgaaaaaggtgcagaatttcaggtgtatctgaaatcatcgggaagctatgcaaaagcaaaagaatccgaaagagatactcttgtatgtgatgaatacggcttttcggaaacaaagaatttgccatacggaacatacacggttcatcagaccaaaggctggaatggaacagaattcattgctgattttgatgtgtttatttctgaaaataataagacttacaaatacctcatcaataacgcaagccttgaaagctatgtaaagatagtaaaggttgacagcgaaacaggcaaacagattgcgtatgcaggcgcaggctttcaaatttatgatcctaacggtaagcttgtaacaatgaagtacacctatcccgaggttacaaccattgctaccttctacacgaatagcgagggttatctcattactcccgaagttattccttatggcaaaggctattcagccgttgaagtacaggctccttacgga

SEQ ID NO: 710 - DNA, 219 bp, Unknown
  BMI gene
  misc_feature: SEQ ID N?1781621
ttgcaattgaaagaaaagattgaggtaaatcctatgaaatgtcctaattgtggttttgaaaccgagtctgcgttttgtcagatgtgcggaacgaaaatttccgaagctttacatacacagaataatgaaacaaccgaaactgagtacacctcgcctttaccgcagacaggctttgaacaggcggagggctttgcaccgcagattcaaaatgaaatgccc

SEQ ID NO: 711 - DNA, 297 bp, Faecalibacterium prausnitzii
  misc_feature: SEQ ID N?1785115
atgaaccgaatggcgcagaagatacgaccttcggcgggcaaggggctggacaacctgcaccgcgccacggacacgctgagcacgatgctggcgcaggaggtgaaggaactgaacacccgccagaaagcggcccgccgcgacggtgcagaggcggccgggaccatgaagggcctgaaggaagccactgcggtgctcaaagacctggccgctgtggccaaggcgctgaacgaacagggcgcggatgcagagggccgggagtgcggcgtggtgctgctgccgcaggtggaggatgtatga

SEQ ID NO: 712 - DNA, 417 bp, Unknown
  BMI gene
  misc_feature: SEQ ID N?1787956
aatagaatggaaaacatagcagagcccaaaagaactccagaagaagttaaccttttaaatccattggtttgggcatatgtaggtgatagtgtatacgaattatttattagaactaatttagtaaataattcaaatgaaaaggtacataaattacatgtaaattcaatcaaatttgttaaggctgctggacaagctaaaattttaaaagcaatagaagaggaacttacagaggaagagaaaaatatagttcgaagagcaagaaacacacaaaaccatcatatagctaaaaatgctacacaagcagaatatgcatatgcaacagcgtttgagggactaattggatatctttatttaacaaagcaagacgaaagattaaaatatatattaaatagagctttagaggaaggaaataaatag

SEQ ID NO: 713 - DNA, 126 bp, Unknown
  BMI gene
  misc_feature: SEQ ID N?1789280
agttgtatttatacttttaaaaataatagtaatttaaaagcaatttatatatactatattttagttgcagcgatggcgaaattggtagacgcgctatcttcagacggtagtgttattaacatgtga

SEQ ID NO: 714 - DNA, 570 bp, Faecalibacterium prausnitzii
  misc_feature: SEQ ID N?1796613
gcccacctcggtgtgctggccggacagggttatgccgaagtgccggtgtacaagccgctcaccatcggtgtgctggccaccggcagcgagcttctggctcccggagagctttgggcacccggcaagatctacgacgccaacggcatccagaatgcggcccgcctgcgccagctgggattcgccgtccgccgccgccactgctcggacgacccggcccgcatcgccgccgagctggaagaactgctcaccgggtgcgatgccgtcatcaccagcggcggcgtgtcggtcgggcagaaggattatctgcccgtagtgctggaaatgctgggtacccgaagcatttttgcgggggtcgcccagaagcccggcagcccgatgctggccgcagaggtcgagggaaaactcgtgttctgcctgtcgggcaacccctttgccgccgcagccaccctggaacaatacgccgtcccggccctgctgcgggcggcagggcgccgggaggaaagctgcattcttccccgcaccacctgcaccctgaccaccggcttttccaagcccagcaaggggaaccgc

SEQ ID NO: 715 - DNA, 354 bp, Faecalibacterium prausnitzii
  misc_feature: SEQ ID N?1807503
atggcaattctggtttccggcggtgccggttatattggcagccctacctgcatcgagctgctgaacgcaggctacgatgtggtggtggcagacaactactacaatgcttcccctgtggtgctcgaccgcgtcaagcagatcaccgggaaggacttccgcttctacaatgcggatatgaccagacacgaggacgtggagaagatcttccccgagtgcccggacatcgccgccgtcatccagttcgccgcctacaaggccgtcggcgagagcgtctccaagcccatcgaatactactacaacaacctgaactgcacgctggtcatcctggacgtgatgcgccgccacaactgccac

SEQ ID NO: 716 - DNA, 138 bp, Unknown
  BMI gene
  misc_feature: SEQ ID N?1816344
cggctggacaacgcggacgatgtatcagagatcatgcagtgctcacctgtcggttcccgttttgccgtatcattctgctgctttaacaagaacgaaaatctttacggcggcaaagaaatgctgtatactaaggtgtaa

SEQ ID NO: 717 - DNA, 504 bp, Faecalibacterium prausnitzii
  misc_feature: SEQ ID N?1818912
gagcaggtgcgccgccagctggccgaggaatacccgctggccgctgtcccctttgacgactacgtggagaagagtgatgtcatcgagcaattcgagcagcctgtcaccgtgacgcccgcccgcatccgccggatggagagacgcagcatccacactgccagcggcatcgaggtgaagattcccaccgagatcctgtcctccgagtcggaagtggagtttctccatgaccccgacggcagcgtctcgctgctcatcaagaatatgattttgttaaagagaccctctccgtcattgctttgcaatgccacctctcccaaagggcgaggccgcgagcaaaagcaaaccggcgagggtttcattttttctcttgccaaatcccctgttttgtgctataccttttcttgtattcatgcttgtatttatggagctgggaggaatttgaaaatggaactggcacttatctgcgcacagcaggtcatcgtgttgtttttgctcatcggggcg

SEQ ID NO: 718 - DNA, 114 bp, Unknown
  BMI gene
  misc_feature: SEQ ID N?1838715
atgtgctataataagtttattatagttattttgggggatataacgcactatgaagaaacgttttttgtcattggggcttcggaaaaaaattcagtttttgtttctttgtacaat

SEQ ID NO: 719 - DNA, 168 bp, Unknown
  BMI gene
  misc_feature: SEQ ID N?1843220
ttgcgttgtgacaaacaagacaacgcagagaacaagccggggtgtggctcagcttggctagagcgcctgatttgggatcaggaggccgcaggttcgaatcctgtcaccccgatcatgaagcatcctgtttcatttcaaaataaatttcatattgatgctatagtttaa

SEQ ID NO: 720 - DNA, 336 bp, Unknown
  BMI gene
  misc_feature: SEQ ID N?1855833
atgctttattgcagaaataaggaggtaacggttttgaattcaaaacttaaaaatgattctaccgactatttgttcaaggcgattctgtcgcttgaaaacgaagaagattgctaccgcttttttgaagatttatgcacaagcgcagaactcaaggcaatgtcacagcgccttgtcgttgcaaaaatgcttaccgagaaaaaggtatatacagaaatcgtcaaggaaaccggtgcgtcaaccgcaaccatcagccgagtaaaaagagcgttgtttgataacgatacatatggctacactcttgtactcgacaggattgaaaacggagaaaaagagtaa

SEQ ID NO: 721 - DNA, 525 bp, Clostridium bolteae
  misc_feature: SEQ ID N?1863475
atgttaggagctccgggcgcaggaaaaggcacccaggcaaagaaaattgcagctaagtatagtattccacatgtttccaccggagatattttcagagcaaatatcaaaaatggaacagaactgggcatgaaagccaaatcctttatggatgcaggcggtcttgtaccggatgagatcactattggaatgctgttagaccgtattcatgaggcagactgcgtaaacggatatgtgcttgatggtttcccaagaacgattcctcaggctgaaagtcttacaaaagctttaagcgaaagaggcgaagcagttgattatgcagtaaacgtagatgtaccagatgagaatatcatcaatcgtatgtctggacgccgtgcatgcttaaactgtggcgctacttatcatattgtttataatccttccaaaaaagaaggaatctgtgatacctgtggacagcagctggtattaagagatgatgataagcctgaaactgtaaagaagagattatctgtgtatcatgaccagaca

SEQ ID NO: 722 - DNA, 1344 bp, Eubacterium siraeum
  misc_feature: SEQ ID N?1882631
acggtagagaaaaaagagggaaagctgaaaggcagaaaggacgttatcatcaccgacctgcctggtatttattcactttcaccctacacccttgaggaagtagtagcgagaaattaccttgttggcgagcgtcctgacgcgatactcaacatcatcgacggtactaaccttgagcgtaacctttacctcaccacacagctggttgagctgggtatcccggttgtagctgcagtcaacatgatggacgtcgtaaagaagaacggcgacaagatcaacaccgaccagctttcaaaggaactcggctgcgaggtctgcgagatatccgcgctgaagggaaccggtatcactgaagctgctgaaaaggctatcagggcagccgaggcaaaggaaaagatggtgccgcagcacacattcagcggcgttgtagagcacgctatcgcacacatcgaggaagcggcgctccatgacctgcccgaggcacagcagcgctggtacgcgatcaagatattcgagcgcgatgaaaaggtgctcgaaatgatcaagataccaaaggaaacgatggagcacatcgagaacgacatcaaggctgctgaaacagagcttgacgacgacgcagagtccataatcacaaacgagcgttacgtttacatatccacgataatcaagggctgcctgaccaagaagaacaagggtggtctgacggtttccgataagatcgataagatcgtcaccaaccgctggctgggtctgccgatattcgcggtagtaatgtggctggtttactatgtatccatggtaacggtcggcgcgaatgccacgggctgggtcaacgacggagtgttcggggacggctggtacctgctgggcatcggcagaggcgcatatgacgaggcttccggtgaatacagcgacgctatgagcgcgcttgacgcatttggcgttgcgcctgatacagaggctgaggatttcgacgctgacgctgcacttgcggatatcaacggcttcacacccaccgaggtttccgttccctatgaggtagaggacgaggaaacgctggctaagagcgagatcacggtatacgcttccgagatacctgcagacgccgacgaggacgagaccctgggcacaacatacacagacgccgttgcttacttcagcgagaatggcttcgacgagcctgaccctgctgagtatggtcctttcgttccgtcgctgcctgagattatcacaaacggtctggagtccatcaactgcgtcgactggctgcagggactcatcgttgacggtatcgtagccggcgtcggcgcggtccttggcttcgttccgcagatgctggtactgttc

SEQ ID NO: 723 - DNA, 1152 bp, Bacteroides pectinophilus
  misc_feature: SEQ ID N?1883327
ttgcaaagcggctgtaatgaacaaaaaggagaattggaattacatatggggaattatttgaccgatattgccattgtcattccggctctgaatccgtgcgagcgcatggttgagctggttcgagagtgcaaagacgccggttttgaaaatattattttagtcgatgatggaagttccattgaaaatcgtatttattttaaaacctgcaaagaaaaatatcagtgccgcattcttcggcatgtggtaaattttggaaaaggtatggcgttaaaaagcgccttcaatcatattctcgaaaaccgtccggacatcacgggaacggtaaccgtagactgtgacggacagcatgtgatcgacgatatcatcacttgtgccaaactcgtctgcgaacacccggaccggctcatcctcggatgccgccagtttgatgatccaaagattccatggcgcagccgctttggcaacaaaatgacctgccgcatcatcaaactcctctgcggaatttcaatttccgacacgcagaccggccttcgcggtatgtcccgtgaacttctcgccaattattttgccaacacaaaaggcgaacgttttgaatacgagatgaatatgcttctctgtgcaaaagataaccagattccttttgaagaatttccgattcagaccatctatctggaaaataacgaaagttcccatttcaatccctttattgattccatccggatctataaggtgtttttgaaatttatgctgagttctttttccagttttatcattgatatctcgctgttttacctgctgcgatttatcttattaccgattgtcggtcaaaaggctcagatctcgctttttggcatcgacatcctgcttttgacatttttgcgtaatgtcatcgcaagactcggttcctcactgtataattttaccattaataaaaagcaggtatttcacaatgattcgaaagatatcaagatcattttccgctattatgtcttgtgcatctgccagcttctcatctcgacattgctggttgactacacactgcggtttatcccattccgcaccgtgcggaaatgtatcattgataccatccttttcctgatcagtttccagattcagagagaatgggtatttaaaaggaaacaaaataagtga

SEQ ID NO: 724 - DNA, 714 bp, Unknown
  BMI gene
  misc_feature: SEQ ID N?1883355
gcatttgacgagtgtgcaccgcatccggcgacgcgtgagtatatggaagcatcggtcgcacgtacgacacgctggctggaacgctgcaaacgtgagatggaccgattaaactctcttccggatacgatcaacaaagagcagatgctttttggaatcaatcagggaggaacctttgaagacatccgtatcgagcatgcacagcgcatttccgagctggatctgccgggctattcgatcggtggactggctgtcggagagagccacgaagagatgtatcatatcctagacgaggttgtgccacatcttccggacaacaaaccaaggtatctgatgggggtcggaacgccggcgaacattttggaaagtgttgaacgaggcgtagatttctttgactgtgtatatccggcgcgaaatggccgccacggacacgcctatacgaactttggaaagatgaatctgatgaacaaacgctttgaactggatggccgtccgattgaggaaggatgccagtgtccggcgtgccgccactactcgcgtgcgtacatccggcacctgctcaaagcaaaagaaatgctgggacttcgattattagtcttgcataatctttatttttataatacaatgatgagtgagattcgcgatgcgatcgaagaaaatcgctttcaagaatataaaaagaaaaaattggattccatggaatctaatgaatactaa

SEQ ID NO: 725 - DNA, 840 bp, Eubacterium hallii
  misc_feature: SEQ ID N?1883368
ggtttggaaagctggatccctatgtatatgacaggccaaatctcaccttattactttaagcagccacaaagcagcccgttctcgcatcttttgaaagtctccggaagtgccgcattaaccggggaagcaatccgtggatatcataatgagggaaaatattatctgacaaaaaacaaagaagagattgctcactacaaaaaatatgcagagcggctgttatcaaaagcatctcctcttatggaaatttatggcaaagaacaatctcaggtttttcatcattttttggaatcgacttccgaaactccgggaaacagataccaccttttgtcgtctttctctttatacacggcaagcgaaactttcattcggcagctgttaaaacacaatcagatttccgataaagggcagacgcagattcttcaatacgctgccgcgcagcgtgagactgcaagtaaaattctatctcacagccgtattacagaagaaatcccgctgctgaaaagggaagaatttgaaaaacatcctataaccttatccctttccggaatgttttatgaaaaagatattttttatacctgggaagattatcaggaacatctgcaattaatgcagcaatatcgtaaaaatcatccgcagtacacaatgattgaaaatccttcttctgcatttcgtaatatacagatttacattcttgagggaaaatgggtgctggtgtctaaaagcaaaacaccggcaatccattttctgattcagcaccccaagatgcaaaaggcctttgaaaatatgatcattcccattattgaaaacgaaagaccgatacatgaccccctctgtttctga

SEQ ID NO: 726 - DNA, 261 bp, Eubacterium siraeum
  misc_feature: SEQ ID N?1883543
ccgggtgctctgttcgtagttgacccccgcaaggagaagatcgcagtagctgaggctaagaagctcggtatcccggtagttgctatcgttgatacaaactgcgaccccgatgagatcgactatgttatccccggcaacgacgacgctatcagagcagtagagctgatcgccggcgctatggctgacgctatcatctctgctaagcagggcaccgctgacgcagcagaggagcaggctgctcccgctgaggacgctgagtga

SEQ ID NO: 727 - DNA, 1074 bp, Unknown
  BMI gene
  misc_feature: SEQ ID N?1884025
atggcggtctgcggttgtggaaactccacgcagaatgcgggaaaggtaccggaattgatcgaggctgtgggagtggatatggatactgcggtagtaacgagaatggatctgagcggcgtgacatccttttctgcgcagatcgttcccaaaatagaaaagatggcatttctttcttcgggaagtatcgataagatgaatgtgttaattggagacaaagtgaagaaaggtcagcttcttgcgacattggccggaggcagcggaaaagtaaaagcgctcaaagaagagattgcgtctctcaaagaagaaaatgaggggacaaaccagcagagcaaatatgatattgatatgttacaggaaaatctgaatgatctgaaaaagcaggcgaaagctgcgaaaagcggaaagcagaagacgatgttaaaaagccagatcgtggaaaaagaagaagatattaagattgccaaattgaaattagagcagcaaaaagaattgcagcagctggagatcagccagaaagaggcagatatcaaagaggcacagaaaagcacgaaaaattcaaaactgtattcgaccatagatggggaagtcatcagtacgagtggcggaagcggctacatggtacagggaggaagcgtagcgattcaggttgctaacatggatgctcctcgcttgaagacggcgtatgtttctgacagcaaactcgcgaaggcgagcagttatgtggcgattgttgacgggaagaaatacaaagtggaagtcgaagagcaggaagtatcaagacaggatatcgagatgggaaattatccgaaaaacagctggtttgactttgcggcagatcatgtagatgcgaaggtcggcggctcggcgacgatcgaattgtacaccgatacggtcaaagatgcacttgtcgtgcctgccaatgcggtgtatcgttccaaagaagaatcctacgtttatctggtagaaggcgatgcaaagaccaaaaccatcgtaaagaccggaacggaaacggatgcttacatacagatcgaaagtggagtaaaggagggagatgtagtctatgtggaaggttaa

SEQ ID NO: 728 - DNA, 1293 bp, Eubacterium siraeum
  misc_feature: SEQ ID N?1884423
atgatggtttgctccttttgcggaaagaatgaaaaccaggtaaggcgcattctttacggaggaaaaggcgagaattccgttatctgcaacgagtgcattcttgcctcttacaacatgctggtcgaaagcggcgacatcaagcccggcagaatgggtcaggctgcaccggtcaaggagtctgaattcatttcggacagcagcgaactgatgaagccggaggagatcaaaaagtatctcgatcagtatatcatcggacaggacgaggcgaagaagatactcagcgtgtccgtttacaatcactacaagcgtacattcctcaatgacgaggctgacgacgaggtcgagctgcagaagagcaacgtgctgcttctcggtcctaccggcgttggtaagaccatgctggcgcagactctcgcaaagctgctgaatgttccgttcgccattgcggacgctaccacgctcacgcaggctggctacgtcggcgaggacgtcgaaaatgtactcctgaggctcattcaggctgctgattacgacattgaggctgcagagcgcggcattatctacatcgacgagatcgataagatctcgcgccgcagcgagaacacctccatcacccgcgacgtaagcggcgagggcgttcagcaggcgctgctgaaaatagttgagggcacggtttccaacgttcccccgcagggcggcagaaagcacccgcaccaggaattcattcagatcaacacgaagaatatcctgttcatctgcggcggcgcattcgagggacttgagaagatgatatcttcccgcgtttccagctctgctatgggatttggcgctgacgtggcttccaagaaggaaaaggaaagctacaggatactgcaccaggtgagccaggaagatctcgttaagttcggaataatccccgagcttatcggtcgtctgccggttgtcaccgttctcgacgcgctggacgaggaggcgctggtgcgcattctggacgagccgaagaacgcgcttatcaagcagtacaagtatctgtttgaggctgacggcattgatctggagttccagccggaggctctgaaggctatcgcgaagaagtccattgagcgcaacaccggtgcgagaggtctgcgttccatcgttgagcagacgctgcgcgacatcatgttcacagcgcccagcgacgaaacgatcagcaagatcacgatcaccgctgactgcgtggagggcaagggagagccgctcatcgagcacgaaaaatccacaaagaagtctgccaagaaatcggcaaagtaa

SEQ ID NO: 729 - DNA, 381 bp, Clostridium phytofermentans
  misc_feature: SEQ ID N?1885117
atggatcagagagcgatcaacgcatatcagagaaatgccgttatgacggcttccaaggcagaactgacactgatgctttatgacggagcaatcaaattctgcaatattgctttgagcggatttgaaaaaaaagagtatgaaaagatcaacacaaatctgaaaaaagcacaggcgatcattactgagtttcgtgccacactggatcataaatatccggtatgggaagattttgagagagtttatgattatatttaccgttgcttgattgatgcgaatattcacaaagatgaagaaaaattacaggaagctcttaaatatatccgtgaaatgcgggatacatggaaagaagtgatgcgtctcaacaaagcaggcagtaagtaa

SEQ ID NO: 730 - DNA, 372 bp, Unknown
  BMI gene
  misc_feature: SEQ ID N?1890560
atgcagacacaaagcacacatttcgagaaaagaggcgatgatatgaacacaaagcgggaattttggcagcgcaatgcgatggcagtaatcggtatgctggtattttcagcaggcatcaatctttttatcgtgccggcgaacctctacaatggcggggttctgggaatcagtcaggtaatccgtacagtattggtacgctatcttcatgtggcatccggaacgacggatatcgccggtattattaatatgcttctgaacattccgctctttgcgctggcgtatgtatttgtcggtaagaaatttttctttcgcacgctggtctgcgtgatcagccagaccttgtttctcagtctgattccgataccggcgggg

SEQ ID NO: 731 - DNA, 2463 bp, Eubacterium ventriosum
  misc_feature: SEQ ID N?1890808
atgaataaaaagaaaatgacatattttgagagtaaaataaacacagtaacagatttagagaaaggtgagaattatatgaaacgcaaaattgtgatcgctggtgcggtaatcgcatgtgcagcagcatgtcagcttgtgaatgcggatgcagcacaggcagctaagaaatataccatcagcaaaacgacaaaaccatgcagcagtgcatacataagggacaagggttacaatgccaaatccaaaaactactttacgattaaatcgtatcttgaaaaattgaaaaagcagggtggtggtacccttgttttgaaaaaaggaacgtacaaaatatgttcgacattgacggtgccaagcaaagtaaccattcagttgaaaaatggcgttgtgctgaaaaagacggacaagaccggaagcaagtcattgaaagccggaaaagtcatgttcaaactgacaagtgcgaaagcaaaagattacaaaggcacgaaaaaagtagtgatcacaagtaataaaaaggcaacgatcgatcttggtaaagtaaaaaatgcagttgccattgatacggggcataattacaacgttaccgtatccaatttgaaattccgcaataaaaacgccggaacatacattaatatcgccggaagccgtactgtaaaagtgacaaattgtaccttccagggtaatgccgcttataccggaggaagttatcaggcagctgtactgatcaatgcgtatggcagaactccgtgtaagacggtaaagataataggaaatacatttaccaatcttgaaaatggtatccgcacgacaaaatacaaaaagcaggtttattccgagggagtatccattacaaagaacaaatttaaaaacatgacaatcagcgcagtgaccggaaaaatgtggaccggtgcagttattaccggaaacacggtttatcgtagtgatgccagcaaaggcaccgcgtttgcgttccagttgtacagtatgacagaaccggagatttccggaaatacaattgacaaatgccgtacgccgatttattttggaagagcttcgaaaattgacaattccatctcggaagcaaagatttcttcgatggaaaataacacggtaacagatgctgtggtttactatgtcattcagaagcatgactcagagacaagattgttgtattttaaagacaaaaatgataaagatttccgcatcacaccggagacaactccgtatcgcggacattacgagacgacttccggatatacggcaaacagcggacaggcaaagacatactatgtattccgttcgtatatggagcagctggaatataccggcggcggtacgatcacggtagcggccggaacatatacgttgagccattctgtctgcattccgtccaatgtaacggtaaactttgaagatggcgtaaagattcagaaagtaaaagcggtaaataccaacctggcaaccaacaaaacgatgtttgaactggtgccaccttccaaagaaggcgtgaaaaattcagtgggcggatacaacggttcccagaatgtaacactgcagggaaatggaagcacgatctttgattgtgcctatacgctgaacgccatggcagttgttatgggacatgctcagaatatcaacatccgcaatattgcatttacgaacgaaaatggttcgcattttatcgaactaaattcgtcaaaaaatgtcacagttgaaaattgttcctttacggactttaagatttataataataagagtcataaagaggcgattaacgttgacacgacagactctaacaacaatgggtttaattatgagtggtccaatcatgaccgcaccgcatgtgatacggttatgatcaataattgtatgtttacaaatataggtgtagctgtaggaagccatacgtattccgtagctatgaatgatgtaaatacacaggtgtatcatgaaaatatcacgattcagaactgtaaagtaagtcagacttacaatgccggtattcgaatgcttaactggcgtaatgcagtcattaataacaatgaatttttgggtattcaaggattggaagacaacaaaggatacaactatacctgtattcttgtgaaaggtgccgtaaatcctacgattacgaaaaatacgtttgaaaaagcgggaatgaagaaaaattatgcagttgtcatttatgagaagacgcagccggcaacagatggtgcgattgcagccggatatgccgatacctatagtgtgctgagtgaagaaaaccgagcggctcttcgtgacaatacggtaaaaggtttgtgttataagagattccttacgaagtatgcggatggcactaacgatctgtatacggaagatggtgtgacaaagaatccaaacaatctgtttaacgattcaaatagtgctacggatggagacaacgtaacgattccggacgatggaaaagaagacgcaaccgaataa

SEQ ID NO: 732 - DNA, 1224 bp, Unknown
  BMI gene
  misc_feature: SEQ ID N?1891748
atgatcatttttcacatcgatgtcaacaatgcatttctgagttgggaatccgtgtaccgcctgcatgaagaaggcgaaacacttgatctgcgcacagtggctgcggtcattggcggcagtgaaaagacgcggcacggcatcgtgcttgccaaaagtcccattgccaaaacttacggcatcaaaacggctgagacattgtcggatgcccggaaaaaatgcccgaaccttttggtcgttcctccccgccacgacatttaccgtgacttttcacaccgattgatcaaatatttgaagtcattgacggatactgtggaacaattcagcatcgacgaggcttttgccgatatgacgggcagcgaattattgcaaaaatattctgcggtcgaagctgccaattttattcgtacagaagtggaaaaacgttttggtttcaccgtaaacatcggcgtttcctcttgtaaaatattggcaaaaatggcatcggattttgaaaaaccaaataaagtgcacaccctttcccccgacgaaattaaggaaaaaatgtggccgcttccggtacgcgacttattttttgtcggcaaatcttcggagcagaaattatacacgttagggattcgcacaattggcgaacttgcggcgtttgaccccattatattgcaaagtcacatgggaaaacacgggcttttgatccacgaatacgccaatggcattgatccgtcgccggtcgcctcacgcactccggaaaacaaagggtatggaaattcaacgacacttcccaacgacgtaacagattctgcggaagcgaaaaaaatactccgcaaattgtgcgacaaagtagcatcacggcttcaaaaggatgaaatgcgcgcctttgtcgcagccgtttcaatccgcgacaatgaatttcacaatgtcagtcaccaatgcagtatggtatctgcgaccaacgatccggacacattatacacacactgctgccagttatttgacgaaatctgggatggctcgccgatccgcctgctgggtgtttccacctcaaaattgacaaaacatgctgccgagcagctcaatctgcttgatatgccatttatcgctgcttcggatgccgaagaaaaagcgacactttcggccaaggaatatttccaacgccagacaaaattggacgaagcaattcaaaaaataaagacaaaatatggaaatgacgctattacaaaaggaatctga

SEQ ID NO: 733 - DNA, 651 bp, Clostridium bolteae
  misc_feature: SEQ ID N?1892260
atgaataaaaaactatttttgtttgatcttgatggcacgttatcggattccagcgaaggaattacaaaagccgtttcatatgccttggaagcctttgggatcaaggtcgcggaccgaaaggagttatgctgtttcatcggtccgccattgccggaatcttttcagaaattttatggcttcagtgaagaagaagcggcacgcgccacagaaatttaccgttcctattataacgtaaccggtaagtttgaaaacaccccgtatccgggaatccgggaattattggtgcacatgaaagaacacggcattccggccatggttgccacttcgaaaccgattgtgaccgcaacagagatactggatcacttcggatttcttccttattttgccaaaattgaaggaagtgttccggaagaaggacgctacaaaaagaccgaagtgctttcatggcttttgtcccggattgatctgcccaaagaacagattgttatgatcggcgatcatccggatgatatcaatggtgccagagaaaatgggattgactgcatcggagtgctgtatggatttggaaaaaacgaccagattgaagctgccggtccggcttggacagtcaaaacagtggaagaattggaaaaactcattttaagtgcctga

SEQ ID NO: 734 - DNA, 675 bp, Unknown
  BMI gene
  misc_feature: SEQ ID N?1894475
caggcatatacagactatgagggcatgatggaactcacagagagcatgtaccgctatctggcagagaaagtatgtggcagcgctgtaattacctacaatggcatcgagattgacctttctaagccatttgagcgcatcacaatgattgatgccgtaaagaaatatgcaaatattgattttaacgaaataaagacagatgaagaggctaagaaacttgccgatgaacaccatatcgaatatgaggctcaccacaaaaagggtgatatcatcagcttgtttttcgaagaattctgcgaagataaactggttcagccaacatttgttatggatcatccaattgaaatctctcctcttaccaagaaaaaaccggacaacccggagctggtagagcgtttcgaacttttcatcaacggatgggaaatgtgtaatgcatactccgaactgaacgacccaatcgatcagagagagcgttttaaagcacaggaagaggcattcgccgcaggagacgaggaagcaaaccacaccgacgaggacttcttaaatgcattgtccatcggcatgccgccgacaggaggtatcggttacggaattgaccgtctggtaatgcttttgaccgattcaccagcgatccgtgacgtgatcttgttcccgacgttgaagagtttggataagtaa

SEQ ID NO: 735 - DNA, 780 bp, Syntrophomonas wolfei
  misc_feature: SEQ ID N?1898063
tacaacaaagatagtagcggcaactataacccggtacagcaaaaccttacagtgaaggtaagccctgcttcttataagatcacgcttaccgggcaagcggacgacccaacgcagattactctgaatgaggctgtggtagaacccggcaataccggtacaacagttacttacggctacaacatcacaaatgaagcccccgcaaactggcagacggagcgtgtattctctggtctgaccgccaacacgacctactatttctttgcaaaagcagaagttactacaaaccatgcaaataccatcagccaaggcgtggcaatcacaactcctaaaaagtctgtgagcgggattgagattatcaatcagcctgccaacctgtcttacaccagcggacagacgctggatttgaacggtctgtcagtgaatgtgaactacaatgataacacaagtgaaaacattacatgggatagcggcaaactgacctccgatcctgctcagggaacggtgctgacggttgcagagcataacggcaaggtaattataatcagctacggcggaaaaacggccaaaaccgatgcacttaccgtgggtaaggcagagcagccggcaccaacaccggttcctggttcatcagacaatgcaacaccggctccgggggcaacagaagcaccggtcgtgaacaaagaccagctaccaagaaccacatttgtacgccgtaagaaaattggaaagaaaggcatccgcattacctggaaaggggtacgtggagcacaatcctataat

SEQ ID NO: 736 - DNA, 810 bp, Clostridium botulinum
  misc_feature: SEQ ID N?1902038
atgaaaaatttttatgtattaacggatgcattggaatatattgaaaccaatatttgcgaggaagttgacagtcaggcagttgccgattattgcggcgtgtcgctgtcaagtctgcaaaagttgtttcggctggcactgcaccgaagcgtgaaggattatattttgcggcgcagaattagtctggcggccaaagatattctggatacggacatgaaaatgatagacattgcttacaaatatcagtttgggtcgccggaaaattttgtccgtgcgtttaagaaaatatggaagattactcccacagagtacaaaaaaacatggcggttttctgagatatgccccagactggattatcaatatcaggaaggagcagatgaagatatggcagcaaaaagaatagatatcagtgaagcttatgatgaaatttgcagaatgaaaggaacctatgtgatttgttttgatattgtggggcttatgccaatcaatgatatttcaagggaggcaggagatttggcgattttggaatccttaaaacgaatcgagcaggtttgtacagaaaatatgttacaacttcgtattggcggggatgaatttgccttgataacaggaagtgagaatgaaaacgaggtaaaaaatatcatcgaaaaggttcttgcgcacaatggagaaaaaattctgtggaataataaagaaatttcattgagtctccgggcggggctctgcaaagtgccggatggaaacttgcgctacaacgagttttttgaggaaatgcatgaggctatcaatagcgtgcgaaaaaaggaaagatga

SEQ ID NO: 737 - DNA, 1302 bp, Eubacterium siraeum
  misc_feature: SEQ ID N?1902353
atgtacaaacaggatatccagggcagcatcgcgcatgccacaatgctcggcgaacagggcataatcagcatgagcgacagcctggagcttatcggtggtctgaaagagatcctcgcagatatcgaaagcggcaagctgcagttcgacatgactgcagaagatatccacatgttcatcgaagcggaactcacgaagcgccttggcgacgtaggcaagcgcctgcacacttcccgttccaggaacgaccaggtggctcttgatatcaggctgtacctgcgcgacgcaataaaggaactccgcggactggtggtttcgctggtaaaggtcctctgcaatatcgcagacgaaaacaccgaaaccatcatgccgggttatacgcatctccagcgcgcccagcccatcacattcggtcatcacatgatggcgtacgctcagatgcttctccgcgatatcgagagatttgacgacaccctgcgccgcatgaatgtttcccctctcggcagctgcgcgcttgccggaactacctaccacataaaccgcgaccgcaccgcagaactcctcggaatgtccgcgccgatggtgaattcgcttgacggcgtttccgaccgtgatttctgcattgagctcgcgagcgcgatatccatctgcatgatgcatctttcccgcttctctgaggaaataatcatgtggtgcagctgggaattcaagttcattgaactttccgaccgtttttccaccggttcaagcatcatgccgcagaagaagaaccccgacgtcaccgaacttatccgcggaaagacagcccgcgttatcggtgacaacatgactctccttgcaatgatgaagggacttccccttgcatacaacaaagacatgcaggaggacaaggaagccattttcgacgcagttgacaatctcaaactgtgccttacaacatttatccccatgctcgaaacaatgacgctctacaaggacaacatgcgccgtgcagccgcaaagggcttcatcaacgcaacggactgcgcagactaccttgttaaaaagggaatgccgttccgcaccgcatacaagataacaggcggtctggtcgcacattgtatcgaactcggcaccacccttgaggaactcccgctcgccgattatcagaagcagagcgagctgttcaccgaggacgtttatgaggctatcagccttgacacctgcgtaaaggagcgcaaatccttcggtggacccgcgcccgaaagcgtaaagacgcagatagaactcaccagaaagaaactggaggaactttgcaatggttaa

SEQ ID NO: 738 - DNA, 1932 bp, Unknown
  BMI gene
  misc_feature: SEQ ID N?1907099
atgagaattacagatttattaagcaaagatggaatcgagcttaatgtaaatgcaaaagataagaatgacataattaacaagatgacaaaattaatgttaaaaacaggaagaattacagatttaaatgcatataaagaacttgtactaaaaagagaagaagaaggaagtactggtgtaggagaaggaattgcaatcccacatggtaaaggtgattgtgtaactgaacctggtttagtagcaatggtagtaccaaatggagtcgaatatgatgcgctagacggaaagccagttaatttactatttatgatagctgctccaaatactagtgataatgtacatctagatgtgttaagtagattatctacaatgttaatggatacagaatttaaaaataaattaatttcagctaaaagcaaagaagaatttttaaatataataaatgaaacagaaaatgagaaatttaaagaagaaacaaaacaagagcaaggctatgaaatattaggaataacagcttgccctacaggaattgcacatacttatatggctgcagaagctttagaaaatgcaggtaaagaagtaggacatcttgtaaaaatagaaacacaaggacaatctggagttaaaaataaactaacaaaagaagaaataaaaaatgcaaaagcaataataattgcagcagatatagatattgacttatcaagatttaaaggtaagaagattttaaaagcaaaagttgcagatggaattcataaaccaaaagagttaatagaaaaagctttgacagataaaaacattccagtttatcaaggaaacggaaaagatgattcagaatatgaaaactcagatggtgtaggaagcagaatatatagacatttaatgaatggtgtaacacatatgttaccatttgttgttggtggaggtatactaattgcaatagcatttttattagacgattattctattgatccatctaactttggtatgaatacgcctattgctgctttctttaaaacaattggtggtattgcttttgatttcatgttatgtattttgtctggatatatagcaatgagtatagcagataggccggggttagcagtaggcttcgtaggaggagctgttgcaaaagcaggaacaacatttgcgtctttatcaaatcctgatgttacattagtaagttcagggttcttaggagcattaattgctggttttattggtggatatgtagttcttttattaagaaaagtattttcattcttaccaaagagcttagagagtgtaaaaccaatattaatttatcctgttggtggtattcttttaataggactaataatgcttgctattaaccctgtagttggagcaattaatacagcattaaataatttcttatcatcaatgcaaggagcaaataaaataatattaggagctattttaggaggaatgatgtctgttgacttaggaggacctgttaataaagcttcatatacatttggaacaggaatgcttgcagaaggacattatgatataatggcagcagttatggctggtggtatggtagcgccacttgcaattgcattacttgcaacattcttccctaaaaaattaccaaagaaagatagacaatctgctttattaaactacattatgggattctcttttatatcagaaggtgcaataccatttgcttcagcagatccaatacgtgtaattgtttcttgcgtaattggttcagcagttgcaggatctttatcaatgttatttaattgtacattgatggctccacatggtggaatattcgttttaccagtggtaggaaatgcagcactatacttattatcaatagttataggatctgtagttgcaatgcttatattagcagcattaaagaaaaatgtttggagtaaaggagatgaagtaaaaaatgttaagtaa

SEQ ID NO: 739 - DNA, 348 bp, Bacteroides cellulosilyticus
  misc_feature: SEQ ID N?1910670
atgatcaaacgattcgcttcacattttatttttctgcccggatatggttatctcaaacaatatgtggtaggggtggaagaaggacgagtcgtgtccgtctttcctttgacagaagagattgaaggagtggaatggtttcccggagtcattgttttattgaataatgaagaagatatttccgaagggtactccggtatatttcagaaatcaagtgaagtattagaggaacttccggaagttttctgtcaagaaacgtttccttccggaataagtgcttatctattttatcctttcgattttacaacgatgcagcctgtcggcggaactcagcacagaccactgcggtag

SEQ ID NO: 740 - DNA, 582 bp, Unknown
  BMI gene
  misc_feature: SEQ ID N?1917517
atcatattcgaagctgatacacgcgccggaaaactattcgacgttatcctgatctggtgcatcctgctcagtatcgggcttgtcatactcgaaagtctgcaagggttgccggtatggctgaaaacgcctttcatcgtgatggagtatctgctgacaggcttcttcactttcgaatatatcacccgattgtattgctcacccaaacctgcaaagtatgctttcagcgctttcggcatcatcgatttactggccacgctgccgctttatcttgcttttctgttccccggagcacgctatttgcttatcatacgggctttccgcttgatacgcatattccgcgttttcaagctattcaacttctggatagaggggcaaatgctactgacagcactacgcgacagcagcaagaaaatctctgttttcttcatgtttgtggttattctggtgatatctatcggaacactgatgtacatgattgaaggaggaaagcccaatacgcagttcagcaatattcccaacagtatctattgggcctgcgtcacgcttaccaccgtaggttacggagatataactcctgtcacc

SEQ ID NO: 741 - DNA, 111 bp, Unknown
  BMI gene
  misc_feature: SEQ ID N?1919046
tgccacgaagagcagccgccggagtttgacgtgggcggcgggcacaaggccagctgctggctgctgcatccggactgcccgtgcgcagcggagaggggggacgaggaatga

SEQ ID NO: 742 - DNA, 951 bp, Unknown
  BMI gene
  misc_feature: SEQ ID N?1919943
ggaaggttattttttatgttagattttagaacagaccttgctgatgaaagaaaagatttgtataaaaaagcaaacaatatagaaaatgagattgatggaatagaagcaactgaggaacagataaataataatataaaagttacacgagttaagataatgaatgaacaaggtgaaagagcattaggtaaagtaaagggaaattatgtaacaatagatatgaaaaatatgaaatatatgggagaagaagaagtccaaaaggcaagtgaaatattatgtgaagaattaaaaaagatgatagatgaatatgtaaacaaagaacaggaaatattagttgtaggtttaggaaatatatatgttacaccagatgcattaggtccaaaagtaataaatgagatagatattacgagacatctattaaaatatgtaccacaatatttagataaaaacacaagaccagtaagtgcaatttcgccaggtgttttaggaacaacaggaatggaaacagcagagattttaaaaggaatagtagataatgtaaagcctaaactagttatagttatagatagtttggcttctagaagcatggaaagaataagcagtacaattcaattagcagatacaggaattgttccaggtgcaggagtagacaatgctaggaaagagttaacagtaaatacattaggagttccagtaattgcactaggaataccaacagttgtagagacagcagttgtggtaaatgattgcttagatgtttttatagaaaaattacaagaaaaagcagaatctaatgaatatttaaataaactaaaagaagaggataattatctggagataaaagaagcattaataccgaaaaattttaattttatagtaacaccaaaggaaatagattctttagtagaaaatatgaaagatgtagttgcacgaggtattaatatgagcttatag

SEQ ID NO: 743 - DNA, 303 bp, Roseburia inulinivorans
  misc_feature: SEQ ID N?1921986
cccgatataaatgaatataagacattctatgaaagcattgatccggcaaatgccgaagctatttataaacaggtgatcgaacagcagcaggcagatgaacagttagatgcatatgtgaagatgtattcagaaatgaagccgaaacaggcggcagctattttcgatacaatgaaggatgatctgaaattagtagcaaagaccttaaaagcgatgaaaccggaatctagtgcgagtattctcggggcaatgaatcaggacacagcagcaaagctgacgaagatcatggaaccctctgaatcataa

SEQ ID NO: 744 - DNA, 1281 bp, Ruminococcus torques
  misc_feature: SEQ ID N?1926277
tcgtatgtggtatccggcgacccgttttatattggcgctgctggcacaccgacgtttcctttaggcactgtgaccgtccaggaaactaaagcgccggagggatacgtgctgtcctctgcggcgcgtccgaacgacgtattcgtgcagcgcattacaatgtcgggtattgaggggaatccggctgaggtctggaatgagcatcaattcctggacgattctatccgcggcggcgtaaagacgacgaagctcgatggctactaccaaagcgcgaccgcgcagggcgatggaacaatgcaaggcgcgaccttcgccatcaaaaatgcatcagagaaccccgtcgtggtcggaggcgtcacatacgagccgggcaaggacgtggccaccatcacctccggcgccgacggcgtggcgcagaccgcgagcgaccttctgccctacggcacctacgagctgcgcgaaaccgtcccgccggagggctacctgctctccgacgaagtatggcgcttcgagatccgcgaggacggcaaggttgtggaggcgaccaccgagcaggccatcgacgaccaggtgaaggccgcggagtgcttcatcatcaaggtaggcacgaagataggcgatgacgtcaccgagggcgacaaggccgacgcgatacccttgccgggggtcgagttcagcatctacgcctccaaggacttcgtggataacggcgacggaacctacacggtgcgcgacggagccgcgccctatgccactatcgtaaccgatgagaacggcatagcggacacgtcctacaacccgcgaccggacgatcagcacggcgcgttgccctacgatgactacctggtgatcgagacggggccgaagccgaattacgatcccatagagccgttcacgttctctgcccgcgaggacaagaaggtgtaccacttcttcgccaacaacacgtacgtcactgcgggcgtcgagctcgtcaaggtggacgccgagtcgggcttgcccgtgctggttgcgggaacgcagctgcaggtgctcgatgcgtctaagacccccattgtgtggcacgagacgtatcccgaggcgatcagctacgacactctcacggtcggcgatacgggccgcgtgtacctgcctcagaagctcaacgccggatcctactaccttcgcgaggtgtccgcccccgagggctacctgctcggccatgccgacgtgcccttcacggtgtcaaccacgacggactgggatgatccgcttgtggtcgattacgccaacatgccccagaag

SEQ ID NO: 745 - DNA, 792 bp, Unknown
  BMI gene
  misc_feature: SEQ ID N?1926370
atggataatgtacaaagtattctaaataattattataatgaatatgacgaagatggaagactagaaaaagacaaggcacatagtatagaatttataacaacaacaaaatatattgaacaatatttaaatgaaggagataaaatattagagataggagctggcacaggtagatataccttgtattatgctaaaaagggctttgatgtaagtgcagtagaattaatagatagtaatttagataaattaaaaagtaaaatagaagaagggatgtgcgtaaaagcagtacagggaaatgcaatggatttaagtctgtttgaagataatacatttgatataacattatctttaggacctttataccatttatttactgaagaagatgtaaataaagctgtaagtgaagcaataagagtaacaaaaccaggtggaaaaatatttttcgcatatattactaatgaagctgtaatttttaattatggtttaaaaaaaggtcacttaaaagaaatagaagaaatgtgtgatgataattttaaagttccaaatattccagaagaaatttttgctgtaagatatataaaagattttaataaaacaatgtcaaattataaaaatattaagaaacttaaagaacttgcaacagacggaattgctggaggtattggtgctatatatgtaaatgaattatctgatgaagaatttaaaatatggataaactatcatctagcaacttgtgaaagagaagatttaatgggttgtagtaatcatattttatatattgcagaaaaaatataa

SEQ ID NO: 746 - DNA, 1146 bp, Unknown
  BMI gene
  misc_feature: SEQ ID N?1928977
atggataagccagtgcgaaaagcagtaagatgttatttaataaaaaatgataaaatagttgttacaaaatataatgagcctaataaaaaagcaggatattatgaaattcctggtggaaaaatagaagcaggtgaattgccagaacaaactgcaataagagaaatgcaagaagaaacaggaataatagttaaaaaattaaaaaataaaggaaatttaataatagagtatccagatagaaaatttgagtttgttgtttttttagctaatacctatcagggagaaccaaaacaattcgaagataatacatctgaatggttagatataaatgagctattaaagaaagaaaaaattttggcgtcaatacaacttttgcagaaagaatatataaatggattggtaaatgaaaattatacatttagtatgtatataaaagttactgaacaagagaatatattagatattaattataaagaagaggaaagatttaaaccaagtaaaagcgaagaaaatggtatcaatttaataacagcaaatgatttgaatattttatctataggtattagtacagcaggttcagcagagataaaaatggcagaaaagaaccgtaatagccatattatagctacaacaattgataaagaagggctaaattatactaaaaacataattgaacaatacggattatcagaaagaatagaaaccaaattagaagatatttcagagaaaatgccatataatgatgagttcttcgatttcgtatatgcaagattagttttacattatttagataatgaaaacttaacaaatgctttaaaagaaataaaaagagttatgaaaaaacatggaagattatatatagtagtaagaagcagagatgaatgggaagcaaaattagaaggtgcttcatatgatgaaaatacaggaattaccaaatatccaaaatatgatacccttggaactgacaatgtagaatacttatatagaagattacatacagtagattctttaagttcatttttagttgcagaaggttttgatataaaatatataaaagaatataaagaacaaagttacaaagattataaaagaactgaaaaggtaaaatatcctaatagtttaattgaatgtttgtgcgaaaagccttag

SEQ ID NO: 747 - DNA, 510 bp, Anaerotruncus colihominis
  misc_feature: SEQ ID N?1953014
ttggcaaagaaacgaaaagcaggcgacggactgatccgtcagcgcgcggacgggcgctgggaggggcggtacgtcgtcggctatgacgatcatggctacccgaaaacaaaggccgtcttttgcaaaagcaagcgcgagtgcaccgaaaagttggcggcgctcaaggcgcagctcggcggcattccgtcggacaagctgcggccggagatgcgctttgcagactggttggattactggtatgaaacgcactgcaagccgaatatccgcacctcgacgcagtccggctacgaagatcgcatccgcctgcacatcaagccggagctgggcgaaattccgctgaacaggctgacgcagaacgacctgcagcagttttacgcgcggctgaaaaagagcggccgcaagacgcgcacggagtattatggtgaggggctgtctgaccgtatggtgcggatgtgccacgcgacctgccgctcggcgctccaaagggctgtgcaggatgggctcatccgc

SEQ ID NO: 748 - DNA, 135 bp, Unknown
  BMI gene
  misc_feature: SEQ ID N?1961020
atgccacctcaaaatccacggtttttcggtgagagctacgctcatatagttttagcccttcctaaatatctgactacaagtagtcaatatttgagaagaactaaaacgatgtttactttagtgtatcattttgtg

SEQ ID NO: 749 - DNA, 1263 bp, Bacteroides pectinophilus
  misc_feature: SEQ ID N?1970307
gtggcttcaaagacacagactaaaggcgtggcagctgtaagaaaggatataagggcggagggcagccatcctgtaagcctgaaagagattaattcagaagaaaaagagagaacactcacaggaataggtgagcttgacagagtattaggcggaggaattgtacaggggtcgcttgttcttgtaggcggtgacccaggtataggaaagtcgacacttcttctgcagatgtgctactatctgtcggatgcaggtgataaggtgctgtatatttcaggtgaagagtcattaaggcagataaagctgagggcagaaagaataggtgagtgtagtgataaccttaagataatgtgcgaaactaatcttgatatcatagagagtgttcttaaaaatgagatgccaaaggttgttataatcgactcaatacagacaatgtacagggaagaaatatcagcggcaccaggaagcgtgtcacaggtaagagagagcacctctatacttatgcagcttgcaaaggggcttaatatatcaatatttatagtaggacatgtgacaaaggagggcgtggttgcaggaccacgtgttcttgaacatatggttgatacagtactttactttgagggcgacagatatgcttcttaccgaatactaagaagcgtaaagaacagatttggttcaaccaatgagataggcgtgtttgaaatgcagcaggatggtcttaatgaagtggctaatccttcagaatatatgctgaacggaaggccggagggagcatcaggctcggttgttgtatgccttatcgagggaacaaggcctcttatggttgaagtacaggcacttgtatgcgattctaacttcggtatgccaagacgtactgcagcaggaactgattataacagggttaatctgctgatggcagttcttgaaaagcgtgccgggatgagaatgtcatcaagtgatgcctatcttaatgtggctggcggcataaaggtgtcagagccggcacttgacctaggtatagtaatagcgcttgtcagcagctttaagaacagggaagtagacagtaagactgttatatttggtgaagtcggactttcaggagaggtaagggcagttacccaggcacagcagagagtgaatgaagctgtaaagcttggatttacgacatgtatattgccatatgtatgcttgaaaaatattaaaaataatgataaaattaatcttattggtatacataatgtcaacgaagcgattgatcttatataa

SEQ ID NO: 750 - DNA, 408 bp, Bacteroides pectinophilus
  misc_feature: SEQ ID N?1970479
atggatggaagattaattatgaataataagtcaatcagaatgattgtttctatatcattgaatgcattatttatagcaatagcggtgattatagttgtcacagccggaactaaggcatatacatttggcaacaggatattcaatgaaaaggcagttgattcaatagacaatgcgaaggttgtggatgttactataagcagcggtgtgtcagctaagaagctggcagcacagttgtacgacaagggtcttataaccgataaagcagtattctactttcaggttaagctatcagactataaggataagtttcaagatggaacatacagccttaacacaagtatgaagccgactgagatgatgaagatattggctggagtcagtgatgagagcagtgacgaagatgaatag

SEQ ID NO: 751 - DNA, 996 bp, Bacteroides pectinophilus
  misc_feature: SEQ ID N?1970662
atgaaaagaaggaagaagagaatagttacaattcttataatagcagctgcggttgctgctgtgctggtatttataaagttttttaacggaaacggtctgtatatatcaacaggtatgggtaaaaatgtacttgcaaaggttgatggacaaaagacttacactatggatgctgctgtgcttatgtcggatgcaaagtcgcagtatgaggaaatgtttggaagttctatatggacacagcagattgatggaaaaacatttgaagaatacatcaaagaccagataagagttaagctcataagagtaagatgtatgaatgtcatggctaaggaaaagggcgttgttcttggaagagaggaaaaagagggcgttaaaaaggcagcagaggagtactataacgctcttacgaatgagcagaaaagtaaatattcaataacagaggataagcttaaccagatgtttacagagtttgccttagcacagaagctgtataacgaccagacttcagttatggatatcgaagtcagtgctgatgactcaagagtaattaatatacagtatatagttactgacacaagggaagagatagaaaatgcctatgctgaacttaacgagggcaactcattttttgcaatagcaaagaagtataattctgatggcgaatatgagtatgagcttagaagaggcgagatgaacagccagtttgaagaggcagcctacgcccttgcgacaggtgagatgagtaaaatcgtggaagcagatggaaagtactacattataagatgtacatctgataatgataaggcaaagacagaggtcaataagtcagcgatacttgcagataagaagcttgaagccttcaatgagcagtttgaggagtatgaagccggcaagtatgttgagtggaatagcagggaatgggaaaagctcagtgtatcgggtgcaacggtatatggagttaagtttgaagatttattcaataccattaatataaattag

SEQ ID NO: 752 - DNA, 522 bp, Syntrophomonas wolfei
  misc_feature: SEQ ID N?1970785
atgttatcagtagttgtacctacatttaatgagggaaagaatattagaaatcttgtgacacagataaatgatgcacttaagggaattgattacgaaatattatttgtagatgatagtaaagataatacaccagaggttattatggaggttgcaaaggacttcccacaggtaagaatggagcacagaacaggtgaaactggtcttgcaacagccgttcttaagggcttcgagcttgcaaagggtgagtatatggcatgtatggatgcggatttacagcatcctccgattgtgcttaaatatatgtataaagctatggaagcgggtgctgatttctgtattccaagccgtcttattcccggtggcgatgacggcggacttaactggtacagaaagttcgtatcgggaacagcacgtaagataggacagtggatgcttccttgcttaagacagatatcagaccctacaagcggactttttatgttcagacgtgaagtaatagagcatgcagaccttcagcctatc

SEQ ID NO: 753 - DNA, 939 bp, Unknown
  BMI gene
  misc_feature: SEQ ID N?1970913
atggcagctaaagttaatccaatcagtcctgctgatgtcaatatgaaagtgaatattgcaggtgtagaattcaacaatcctgtaacagtagcctcaggaacatttggttcaggtatggaatattgtgaatatgtagacctgggtaagcttggtgcagtgacaaccaaaggtgttgccaatgtaccatggccgggcaatccaacaccaagaattgcagaaacctatggtggtatgattaatgccataggacttcaaaatccgggtcttgatacatttgttaagagagatataccatttcttaagcagtatgatacacgtataattgtaaatgtttgtggaaaaacagaggaagattatgtagatgctgttgaaaaattaggtgagcagccggtagatatgcttgaaatcaatatatcatgccctaatgtcaaagagggtggcatagccttcggacaggttccagctatggcagagcgtatcacaaaggcggtcaagaaggtggcaaagcagccagttattatgaagttaagccctaatgtaacagatataacagagatggcaaaggctgtagaagcaggcggcgctgatgcagtgtcacttataaatactataacaggtatgaagatagatattaacagaaaaacatttgcagttgccaataagacaggaggtctttcaggtccagctatcaagccggttgcagtaaggatggtatatcaggtggccaatgcggtaaagcttccaatcataggtatgggcggaattgccagtgcagaggatgcactcgaattccttatggctggtgcaactatggtttcagttggtacagctaactttaatgatcctatgactactataaaggttgaagaaggaataagagattactgtgcgcgtaatggaattgccgatgttaatgagcttattggatgtgtaagataa

SEQ ID NO: 754 - DNA, 369 bp, Unknown
  BMI gene
  misc_feature: SEQ ID N?1971006
atgaatatgggaacagcggttatattagtagtacttgtgatagtagttatatttgcagtaaaaagtggtatacagcatggtaagggcgaaggcggctgctgcggtggcggcggttctatcaaggaggacaagaaggtgcttacaggcgatattattgcaacaaagatagtaactatagacggtatgcactgtgagaactgcaagaacagtattgaacaccagataaacaggatagatggagcttcatgcgaagttaatcttaaaaagaaaattgccactatacagatggataagccggttgataatgaaacaatcagaagaactatagaaagactggacttcaaggtggtagatataaagaacgcataa

SEQ ID NO: 755 - DNA, 189 bp, Eubacterium siraeum
  misc_feature: SEQ ID N?1971147
gtgaaggacatgtcagaagcgaagaaatacgacaggagttacaaagagcagtcagtaaagccggcgctggaaataggggtaaagcagagcatgaacagcgccggagggagatgtcatgaaaatgcccgctgcgaaagcatgtgggcgagaatgaagaacgagctgttttacagtcgtggcattaattag

SEQ ID NO: 756 - DNA, 819 bp, Bacteroides pectinophilus
  misc_feature: SEQ ID N?1971187
atggttgagatgaagtcggtaaaccacagatttttagaaacaggcataaagatgccaaagaagcttaacgtgtttgaggcaagaataagagatgttgttaagaagtacgcttcaagaggaaagatagatatatttataacttatgaagacaattcagagaataacgtcaatatcaggtataatccggcggttgcagaggaatatatggatatattttcacagatggaggaaatgttttcaataagaaatgatataacagtcagtgcgctttcaagatatccggaggttatcactatggaggaggcagcagaggatgaagaggagctgtggaacttcatacaggaggctgtgaaggaggcttgtgaaggttttgtcaagacaagaataactgagggagagaacttaaagaaagaccttcttcataagttagaccatatggaagagcttgtaggctttatagaggaaagaagtccaaagatagtaagtgagtacagaaagaagcttgaggataagatggcggaagtgcttgctgatacaagcatagatgagagcaggatagcagcggaggtcatcttatatgctgacaagatatgtgtcgatgaagaaacagtacgcttgagaagccatataacacatgccagacagtgcctgtcagaggatggcggtataggaagaaagcttgactttatcgcacaggagatgaacagggaagctaacacgacactttctaaggctaatgatatagagatatcaaatgcagcgatagacttaaagactgagattgagaaggtcagagagcagatacagaatatagagtag

SEQ ID NO: 757 - DNA, 516 bp, Faecalibacterium prausnitzii
  misc_feature: SEQ ID N?1971528
atgaagtcagttaatatcaaaaagttatcaatagcaggaatactgtgcgcagctgcagttgtgggaagtcttttttcattcccggtgtttggaagtaaatgtgctccggtgcagcatatggtgaatatattctgtgctgtgcttttaggaccaggttacggagttatgactgcatttgttgcatcgcttataagaaatcttctgggaatgggaagtcttatggcgtttccgggaagtatgttcggtgcatttatatgcggtcttgtatacaagaagtttcacaatatattagcaacgatggtcggccacgtcccgggaacctccatacttggcggtctgtgcgcatatccggtagcaatattccttatgggaaaaaatgcggctaatcttgcattttatgtatatgtatttccattttttgtatcaacatttgcaggggcagttatatcgggagtgatagtgttaagcctcaagcgttcgggaatactttctaagatgcagcagagtatagaatag

SEQ ID NO: 758 - DNA, 741 bp, Unknown
  BMI gene
  misc_feature: SEQ ID N?1971589
atggcatatatgctggcagaatatggcataaaatgcatattatatgagcagtcaggaaacagcgatatacttgaagttatgcttaacggaaagctttatgataatggactgctttactataagggtgtgtggtttgcggcagataatgtaagctataagatgtatggcagcgatgatacagataatgtaaattataagcagaataatgacggcaattttgatagtatgaattttaatgttatgatagtggatgagggtgtatacaatgcagagcgtgtcagctatgatgatattatatgcagctttatccagaatgattatgatattattgatattatggttgcgggtggaaagtatgggactgccaatgagtgcagcatcattgacagtactgtacagcacacacggcttatgcttaatctgttaagtgaacagcagttttatggttatgttaattatatagcaggagaaagaatatgttacaggatgccatgtgtatatggctggagtgaacacaataacgaattagtttcagtaatgaaggactttatagaggataatatgccgcagatatgggaatgtataataacggacacattaaaggaaaggtgcagtgtattatatgaaaaaatgtgtggtatccggaaaaaagtacttaaaaactttcagaggtttatcaggggtatcggaattggaaatgaaaaatgggcttacaaagaacagcagggtaaacaggattaa

SEQ ID NO: 759 - DNA, 549 bp, Unknown
  BMI gene
  misc_feature: SEQ ID N?1971596
atggcgaaattagtagaaacaacttacggcgaagctttatttgagcttgctattcaggaatctaagatcgatgaactatgtgaagaagcacaggttgtgatagaagtgtttaaaagtaacgaggaccttgtaaagatattaaggtcacctaaggttgacaagggtgataaggaggaacttataaagaatgtatttgataagttcgtatctaaggatatcacaggtcttttaactgttatggtgtctaaggacagacaggacaagatagtaagcacacttgagtatttcataaagagagtttatgagtacaagaagataggagtggctttcgtcacaacagccagacctctcacagatgatcagaagctgtcggttgtgagcagactgcttgcaacaactgattatgtggatttcaagatgaactatgctatagatgaatcacttatagcaggtatggtcataagaattggagacagagtcgtagacagcagtataaaacataaaattgatgagcttgccagagatttaaagaatatccaactggcatag

SEQ ID NO: 760 - DNA, 600 bp, Roseburia inulinivorans
  misc_feature: SEQ ID N?1971819
cagttcaaggaacagaagaaggatgaagtgtgtgtatgggtatacagcttatttacagatgtacctggtgactatataaagaagcctatgaaagagtgtactggtgaagagataacagcagagtggttatatcatcttggaataccagtaaatgaaatagatgagcttgctaagaaccactgcaacacaactcctacgatgatgccatatatcacagcattctttatgccaagaagaaagggcgacagaccggatgttattccagatggctgtgtaaactttgcattccttggacagtttgctgaaacaccaagagatactatatttacaactgagtattctgtaagaacagctatggaggctgtatatggacttctcggtgttgacagaggtgttccagaggtatggggcagtgtatatgatgtgagagacctcttagatgcatccgttaagcttatggatggcaagtcaccacttgagatagagttaccgggtgtgcttgacaatatcaagaagccgcttttaagaaagataaagggtactgttattgaaaaggtgcttaaagaccataatgttattaaggattatatgaaatattaa

SEQ ID NO: 761 - DNA, 303 bp, Bacteroides pectinophilus
  misc_feature: SEQ ID N?1972495
atgtggtttttcaatggaagaccggagataggcgggatattccgtgttgataacaagctttcgcttcttggtggtgttataggtgcatttattacatttacagttgtaaagagtgtgtcagagcttggcatagcaaaagcggagataacaatagttgtcgcacaggtaataatggcatatattattgaacttttcggactttttggaagtaagaaggcagagttttcgtggcttaagctgttggcacttgttatagcagtcggaggcgtatttatgttttatgcggtcggaaagaatgagtag

SEQ ID NO: 762 - DNA, 2145 bp, Unknown
  BMI gene
  misc_feature: SEQ ID N?1973327
atgaagacagacattttcaaggaaagaaagaaaaatatagctgaccttatccttaataatgaattatatgttccgatgaagacaaaggaaatagccatattacttggtattccgaaggataagagatacgagctgcaggaagtactggatgcacttgtggctgacggaacaataggagtaagtaaaaaaggaaagtatatgaagccggataatgttgcacttataggtacatttgaaagtacaagcaggggctttggatttgtgtctgtagaaggacaggatgaggatatatttataaaggcaagcgacacgaaaaatgctttctaccatgataaagtcaagatagttataacacttcctaaaaagggcgataaaagagcagaaggaaaggttatagatatagttgaccatgagattaagacacttgtgggaacatatcagagaaataaaaatttcggatttgttgtgcctgataaccagaagatagcatgtgatatatttgtatccaaggagcatgagcagggcgcagttaccggaagcaaggttatagtcaagataacagactatggcaaaggtggaagaaatcctgagggaagaattacagaagtcatagggcatatagacgatccgggaacagatattatgtcgatagtcaaggcatatgacctgccggaggagtttccggacagcgttaaaaagcagctaaagagcatacctgacgaggtggacgaaaaggataaggcgggaagaaccgacctcagggatgttgttatggttactatagatggagaagattcaaaggaccttgacgatgctgtatcgctgacaaaagagggggatatatatcatcttggtgttcacattgcagatgtcagccactatgtaatagagggaagtgcgcttgataaagaggcgttaaaacgtggtacaagcgtttaccttgttgacagagttatacctatgatacctcaccagctgtcaaacggcatatgttcgcttaatgaaggatgcgacagacttgcacttagctgtcttatggatattaattcaaagggagtggtcgtaggtcacaagatatgtgagtcagtcatcaatgttgacagaagaatgacatacacctctgttaagaaaattcttgaagataatgatgcaaatgagatagaaaaatataaagaattaattcctatgtttaagcttatggaggaggctgccgcgcttcttagaaagaagagatttgcgcgtggttcgatagattttgattttccagagtctaagatagtgcttgatactaagggacatccggttaagatagagccttatgacagaaatgttgcaacaaagcttatagaagactttatgcttgtagctaatgaaacagttgcagaggattatttctggcaggaagttccatttctttacaggacacatgaaaatcctgaccctgaaaagataatcaagctgtcaacatttatcaataactttggatattcaatgcacataacagatgagatacatcctaaggagcttcagaagcttttagagaaaatatcaggctcagatgaggaaaatcttataagcaggcttacattgcgttcaatgaaaaaagctaagtatacaccggaatgtataggacattttggacttgcagccaagtattactgccactttacatcacctataagacgttatccggatttacagatacacagaattataaaagaatgtctgcatggtggtatgagcgaaaagcgaaaagatcattactataaaatacttccggatgttgcggagcagacaagcgctaccgagcgaagggcagatgaggcagaaagagatactgacaagctcaagatggttgaatacatggagcagttcaagggtgagaagttctctggtgtcatatcaggtgtaactaactggggcatatatgtcgaacttcctaatacaatagaaggaatggtatctgtaaatgatatgccgggattctatatatttgacgagaaccattatgagatggtaaatgaaacgacacacaaaacatataagctgggacagaaggttgatgttgtgactataggaaccaataagatagcaagaacaatcgattttatgtttgcagaggattatgatgacagatataattaa

SEQ ID NO: 763 - DNA, 600 bp, Roseburia inulinivorans
  misc_feature: SEQ ID N?1974286
atgtctaattcagaaacaagacaggcaagtattcacagaaaaacaagtgaaactgatattgaccttttcatccgtattgatggttcaggagatgcacaggttgatacaggaatcggcttttttgaccatatgcttaaaagctttgcaaagcatggtatgtttgaccttaagttaaatgttacaggcgaccttatagttgactgtcaccatactgtagaagatgtcggtattgtgcttggtgaggctattaagaaggctcttggtgataagaagtcaataagacgatatggagatattattcttcctatggatgaagcattaatactttgtgccatcgacttatcgggacgtccttatcttgtgtttgatgcaacattttcatcagatatggtaggatactttgatacacagatggtcaaggaattcttctatgcaatatcttacagtgcaggaatgaaccttcacataagagagatgtcaggtgaaaacgaccaccacataattgaggggatgtttaaggcatttgcaaaggcattggatgaggcatgctcaaaggatgcccgtattaaatcagtactgtctactaagggcagtttataa

SEQ ID NO: 764 - DNA, 543 bp, Unknown
  BMI gene
  misc_feature: SEQ ID N?1974432
atggacgaagcaaaatggtatgtggctcatacttattctggctatgagaataatgtaagggttaatatcttaaagacagttgagaacagaaatcttcaggaccagatctttgacgtgcttgttcccgttgaaacggtagttgaagttaataacggcaagccaaagacggttgagagaaagatattcccaggttatgtctttgtaaagatggttatgaacgatgacagctggtatgttgtcagaaataccagaggtgtaacggggttcgttggtcctggatcaaagccagtgccattatctccagctgaggtaagatcattcggcatcgatgatgagaatggttcagttgaagaaactaagccagtagtagaatttgctggtaaggttggtgatcagatacagattctttcaggagcatgggagaatacagttggtcagatcacaagcattaatgagggcaagcagtgtgtcactattaatgttgaaatgttcggccgtgaaacaccggtcgaagttgacttcacagatgtgaaggtactgtaa

SEQ ID NO: 765 - DNA, 561 bp, Unknown
  BMI gene
  misc_feature: SEQ ID N?1974667
atgcatagctacgggcaggtgacaataagcagccacagaggaggtgttgttattacagaagctgtatatacgtggcttaagcaggtcataacattttatataatatcatcacttctgataaatgttgttgtttcggacaaatataaagattatataaggatgataacaaggataatacttgtgcttataataatatccccggtcataaaacaggcaggaggtaacattataaagaacagtattgatacattttataaagactattcatctgcatattataagaataatgcggataatacgaatgaatacagttttacggtcagagatgtggtcattaagactgtcaggttacaggtggctgaggttcttggtgaatataatatgcaggcggataatatagatgtaacagtaagtgatgttgcttctgatgattatggggatatgacggttgaaaaggttgtcatacacataaatagattgaaaaaatcggacatagacactttaaaagaaaaaatatcggcaaagacaggcatagatgttggcagtatatatataaaatga

SEQ ID NO: 766 - DNA, 1260 bp, Bacteroides pectinophilus
  misc_feature: SEQ ID N?1975680
atgagcagtgttataataataggtggtggcgctgccggaatgatggctgccattatggcggcaagaaacgggcatagtgttacacttatggaaaagaacgaaaagcttggaaagaagctttttataacgggtaaaggcagatgtaactttaccaatgcaggtgatgaagaggatataagacagagtgttgtaactaatcctaagtttatgtacagcgcatttaaaggattttcaaactatgatgttatgggtttctttgatgaacttggacttaagtttaagatagaaagaggcaaccgatgttttccagagtctgaccattcctcagacgtcatatcagcacttgcaagggaaatgcgtaagcttaaggtcaatgtcctgcttaacacagaagttcttgaggtgctgacagaagagccagaggatggcgttaagaggtttagcggtgttaagtacagggaactgtcttctgataagaaacagacattgaaagctgatgactgcataatcgccacgggtggtaattcatattcaagtacgggttcgacaggtgacggctacagatttgcaaagagcctgtcacatatggtcactccggttattccggcgcttgttccacttacgataagggaagagtgggcttctgagcttatgggtcttagtcttaagaacatatctataagcataaaagataataaaaaggaagtatacagtgactttggcgaaatgctttttacacatttcggtgtgagcggtcctgttattcttagtggtagcagctatacgacagcaatattaagaaaaagaccgcttaagcttatagttgacttaaagccggcattgtcagaagagcagcttgatgagagaatattaagggacttctcggaagaaaagaacaaggcataccgcaattcacttgataagctgcttcctaagaagctgatacctgtaatagtaaggcttagtgatattaataaagataaaaaggtcaatgagataacaaagcaggaaagattaagacttgttcatcttatcaaaaatcttgaaatgataatcacaggaacaaggggctttaatgaagcgattatcacacagggcggtgtcaatgtgaaggagattaatccgtcaactatggagtcaaagcttgtaaaaggtgtgtactttgcaggtgaggtgcttgatgttgatgctgttacaggtggttttaatcttcaggtagcgtggtcaagtgcttatgcggcggcaacacacattttctga

SEQ ID NO: 767 - DNA, 1458 bp, Unknown
  BMI gene
  misc_feature: SEQ ID N?1976403
atggatagtacaatagagaacatgattaacagtattgacttatcggctccagttccagaatatgagcctatgagacagtattattatcttaaggcgtgccgacagatagtaaaggaaaaagaaaataagcttaacagaccacttaaggctgtggtttcaacatttgggtgccagatgaatgcaagagactcagagaagcttcttggaatactcaaggatataggctatgttgagtcagatgatgaggaaagcgcagactttgttatatacaacacatgcacagtaagagagaatgcaaacttaagagtatatggaagacttggacagttaaagaaggttaaaagaaacaaccatgaaatgattatagcaatgtgcggctgtatgatgcaggagccggaggttgtagaaaagataaagagttcatataagtttgttgatgttgtatttggaacatttaacatattcaagcttgcagaacttttatataatagatttacatctgacgaacagattattgacatatgggattcaaccaaagaggttgttgaggaacttcctacttcaagaaagtatccttttaagtcaggtgtcaatattatgtttggctgcaataacttctgtacttactgtatagttccatatgtaagaggaagagaaaagtcaagggagccaaaggaaatagtaagagagatagaaagacttgtagctgacggtgttaaggaagttatgctgcttggacagaatgttaactcttatggaaagacacttgaggataatgttacatttgcagagctgttaagtgaaatagcaaaggtagacggacttgagagaataagatttatgacaccacatcctaaggacctttcagatgaacttatagaggttataagggataatcctaaggtgtgcaaccatatacatcttccactccagtcaggaagcagcaggcttcttaagcttatgaacagacagtatactaaggagcattatcttgaacttgttgataagataagaaaaactattcctgatatatctattacaactgatattatcgttggtttccctggcgagacagaggaagactttgaagatactcttgatgttgtaagaaaggcaaagtatgacagtgcctatacatttatctactctaagagaactggtacacctgctgccaaaatggatggacaggtgcctgaggatgttgtaaaggaaagatttaacaggcttttacagactgtttcagagacaagccatgaacatattaaaagatacgaaggctgtgatatggacgtacttgttgaagatattgacgatcacgacagtgatttcctgacaggaagaatgactaacaatattcttgttcactttaagggtgataaagagcttattggaacagttgtcaatgtccatatggatgagtgcaagggcttctactatatgggaactatgaataactag

SEQ ID NO: 768 - DNA, 1248 bp, Ruminococcus lactaris
  misc_feature: SEQ ID N?1976405
atgaaagcattaaatgaaataggacgtaatgctaaagaagcatcaaaggagcttgcgaagttaggaataacacagagaaataatgcacttaacaaggtggcagatgcacttgtaaaaagagcagattacataaaagaggccaatgaggcagatttatctaatggacgaaagaatggaatgagcacagcacttcttgacaggcttcttcttacagatgcaagaatagaaggaatggcagacggattaagagtgcttgcaggacttgacgacccgataggagagattaagtcgatgaagacaagacctaacggacttatgataggcaagaaaacggttccattaggtgttattgccataatatatgagtcaagacctaatgttacagcggatgctttcggactgtgctttaagtcagccaatgcctgcatattaagaggtggaagtgactcgttgaattctaatatagccatagtcaatgttatagcagatgtattaaagaatgaaggcatcaatcctgatgttatatcgtatataacagataccgacagaaagcacgtagatgagcttatgcatatgaatgagtatgttgacgtgattattccaagaggcggagctggtcttattaaaaatgtcgtaaataacagcacagttcctgtaatagaaacaggaacaggaaattgtcacatatatgtagatgaatatgcagacatagatatggctgtcaatatcatatataatgccaagacacagagaataggtgtatgtaatgcatgtgagtcgcttgtcattaacagtcatatagcggctgaagctattccagctatagtcgacaagttaaaaacgcgtgatgttgaggtgcgtggtgacagcagagcccaggatattgatgacagaatagttccagccagcgatgaagactggggaacggaatatcttgattatattatatctatgaaagtggttgacagtatagatgaagctatcagccatataaatacatataatacaggacattcagagtctatcatcacaaaggattatgccaacgcacagaagtttttaaatgaaatagatgctgcgtgtgtatatgtcaatgcatctacaagatttacagatggctttgagtttggttttggtgcagaaataggcataagtacgcagaaaattcacgcaagaggtcctatgggacttgaggcgctgacaacaagcaagtatataatatatggtaatggtcaggtgagaagctaa

SEQ ID NO: 769 - DNA, 558 bp, Unknown
  BMI gene
  misc_feature: SEQ ID N?1978607
atggaattatttgatatagtggatgaacagggaatacctacaggtgaaactgttgaaagaagcatagcacacagagatggcataaggcatcgttctgaacatgtatggatagcacgccatactcctaccggtgtagaagttcttatgcagaaacgtgccatgataaaagattcatttccgggacgatttgatacatcaagcgctggacatatccacgctggcgaagagccatgtgaatccgcagtacgtgaactatatgaggaacttggaatacaggcagtaccagaagaccttacattcatagatacatttgtaattaattatcaaaaggaattccataataagctctttaaagatagtgagattgcttttgtctatgcttatactaatcctgttgacataagctgtcttacctatcagcctgaggaggttgaaactgctgagtggtttaatcttgattatgtcatagaagaatgtaaaaaacataatcagaagttctgtgctccaatgggcggacttgaactaatccgcaagtatacacttaacggtaatttttaa

SEQ ID NO: 770 - DNA, 393 bp, Unknown
  BMI gene
  misc_feature: SEQ ID N?1978613
atgacatttgttaataaggttcgtaataagacggatgtttatgaaatggacgtaaaggaagcggtaacggaggcggtggatgaatgtattaaggaagatgtgctgtcagaattctttatagaacatagagaagaggtgattgcagtgagtgttttcgagtatgatgaagaagggcatatggatatagtgagagaaggaggacgtgaggaaggaaaaagggaagaatttgcgcaaggaagaaaagaaggtctagctagtggacacgttgaggagagattgaataacctgagaagtataatggataatctaggaaagtcagcagacgaggcaatggacataataggagtaaaagaagacgaaagagaagaacttaagaaaatgttacagaaataa

SEQ ID NO: 771 - DNA, 1278 bp, Clostridium bartlettii
  misc_feature: SEQ ID N?1978780
atgaggaatagtgtgaaagttaaagcagaggatatgcagctttatgctgttacagatacacagtggcttaacgggcgtgactttcttgaagtaatagaaagcgttcttgcaaatggagctacatttttacagttaagggaaaaaaatgccacacatgaggaaatagtggcaaaggcgaaggcaataaagccaatagctaagaagtacggagtgccttttgtcatagatgatgacatatatgcagctaaagaggcagacgtggatggtgtccacatagggcagaatgatgcaagctatgagaaggcaagagaagttcttggagaaggcaagataataggaatgacggtcaagacaaggcagcaggcagaaaatgccataagacttggcgctgactatgttggaatgggggcagtgtttcatacaagcactaaaaaagatgcaaaggatatgagcggggaaacacttttagagcttgcagggatgatggaggatattccggtggttgccattggcggcataagctatgataactgcgattacttaaaggacacaggtgttgatggaatagcagttgtttcagccatatttgcaagtgatgactgtgcgcttgccacaagaaagctttttgtaaagacaagggaattgtttggaaagaaaagaaacataataatggatatggatggcacacttgcagactctatgcctttctggaaaaagagcgcaagagagtatgcgatattacgtggagcagatattccggataatttcgatgagataactggcgttatggaccttaatgattatgctgagtatgttaaaaatgttcttggcatagatactaatcttgagcagataacagaagcggctgtcgagattatgaataaacattacgaaaaagatatacctgcaaaggacggtatgacagagcttgtcacgagagaatatgaggccgggagcagacttgttgtgtttacggcttcagatagaagaagtgttgaaattcttctttcacaccttggaataagagaatgtttttatgatatatatacagtctatgatgtaggacttaagaagagtgataagaacagctatcttaaggtggcagagcttgcaggtatgaaagatacatcacaggtatgggtgtatgaggatatattaagaggtgtaaaggctgcaaaagaggctggacttaatgtgtgtgcagtgtatgatgaggactccgcaggcgactgggaggacataaaagagcttgcggataagacccttgaacttgtgtaa

SEQ ID NO: 772 - DNA, 453 bp, Bacteroides pectinophilus
  misc_feature: SEQ ID N?1978829
atgaaggtgagtgcttttatggacatttacgaatcattaaactctatacttgtgacattgtttaacgatattatgaatatagaagaaaaggctttaattacagacgaattcaaggatatttctgttacagatatgcatattatagaggctgtcggcataggtgaacctagaaccatgagcattatatccaaggctcttggtgttactatgggtactcttactgttggcatcaacggacttgtcaagaagggctatgtcataagaacgcgtggcgaaaaagaccgccgtattgtatacgcctcacttacagataagggtgtggctgcatataaccaccacaagaagttccatgcggatatgattaactacataaccgatggcttaagtgaagctgaagccgttgcacttactaagacctttacaagactggaagaatatttcaagagcttttaa

SEQ ID NO: 773 - DNA, 525 bp, Bacteroides pectinophilus
  misc_feature: SEQ ID N?1980841
atgaaaaaggttgaagattatgtaagaagtattccagattttccagagaaaggaattatattcagagatataacttctgttatacagagtcctgagggcttaaagcttgctatagacggtattaatgagtcacttaaggatgttgactatgatgttgtagtaggtccggagtcaagaggctttatattcggtgttccagttgcatatgcaaacggcaagggcttcgttcctgtaagaaagaagggaaagcttccttgtgaaactatatcagaggattactcacttgagtatggaactgcaactattgagatgcataaagatgccatagtaccgggacagaaggttgttattgttgatgacttaatcgcaacaggtggtactacagaggctattataaagcttatcgaaagacttggcggcgaggttgtaaaggttgtgttccttattgaacttgaaggtcttaatggaagagaaaagcttgccggttatgatgttgattctgttataaagtacgctggaaagtaa

SEQ ID NO: 774 - DNA, 108 bp, Roseburia inulinivorans
  misc_feature: SEQ ID N?1982069
ctgatgggatacatcaaaaagcacgacttcaaggtatttggatggtacagaattgtactgggtataatcgtgcttatatgtggctttgcgggagttatcggagcgtaa

SEQ ID NO: 775 - DNA, 786 bp, Bacteroides pectinophilus
  misc_feature: SEQ ID N?1982882
agggccgataataacgaccacttatttttctttgaatttgatgctgatatatttaagaatattttatatgcacttggattaagtgtacttctgctttttataggtattgtggtaacgtgggttctgtcacttcgtataaaggataaaaaccttcctattataaggtttggttgtatgttttccaatgcggcatatatgggctttccacttattcaggcactttttggaagtgaaggacttatatatgcaagtgcctttgtaactgtgtttaacatattgttatggacacttggatattcggttgtcagcaggactataagcttaaagcttgttattaagaaaatatttacgacacctgctacgatagctgtattcttagggcttataatatttatggcaagaatacctctcccgggtgtgttaagtcaggctataggtctggctggtgcggttaatacgccgctttctatgtttataacaggtatgattatagcggcaagcgatataaagagtatgctttctaacaggcttgtctacttcgcaatagttgtaaggatgattattataccagccatatgtgtcgcggtctttcttctgcttggaataaggggaatggttgccaatatcgtgcttatattggaggcgtgtccgtgtgctgcgattacatcggtatttgcagtgcagtttgactatgatgatgatgtggcagcagcctcggttgtactcactacatttgtcagtataataacgctgcctttagtcgcatttattataacaacactgtga

SEQ ID NO: 776 - DNA, 948 bp, Eubacterium siraeum
  misc_feature: SEQ ID N?1984223
atgaaacgtatagttgtaacactatacagaaagagggaaaaaatgaaaaagaaatcgttaaaagcagtaggaacagtactggcagtatgcctgtgtgcaacagcctgtggaagtacagcttctacaacaacagaggataacacagtgaacagtgaaacaaaggaagtatcaacagaacaggcatctgtggtacaatcgcaggaaacagcagaggtaccacaggatgcaaaagaggcatccgtagataatttcacagtaacctatctggatgatggaaccgttatgctgtccagatacagtggaacatcagaagcatcgattattgtgccgggcgaggtaaatgggaaaagtgtcacggtaataggtgaagatacttttatgaatcatatggagttaaaagcggttaaacttcctgattctataacagaaattggtacagaagcatttatgaattgttttgaattggaaaatgtgtatttaggcatatcacttgagaaagtaggatatagagccttcctatatacagatataaatgatttatctttaccagaatctataaaagaaataggtaatagtgccttttcgggtggaaagtataccgaattgacaataccttcgggaattactcaaatagaaattggtgcatttatgaatacaagtattattacactacatataccatctaacattcaattgataaagaaagatgcatttagtggatgtaatcaactgatagaagtaaccatggaagatggagtagaggtaattggagaaagtgcttttgagggatgtgatgttcttgaaaaagttactcttgcatcaacagtaacagaaataggaccatatgcgtttacaaagtgtccggaacttacttatgtgtatataccagaggctacaactacaattgatgaagatgcattctggaattcagagaatgtaacgatctac

SEQ ID NO: 777 - DNA, 567 bp, Unknown
  BMI gene
  misc_feature: SEQ ID N?1984812
atgaactggagacatggtattcatcccaataattacgccataggtgaaaccgaaaagtattattccgatatgtccgagaaaggttgggagcttgtcaagtgcggcataaccttgagccgtttccagaaaacagaacccaagaaaatgcgataccgggtcgaggttgtaaatctgaaatctttagaggacgggcatctgccagaagaacagattgcagtctacgaggattgcggttgggagtatgtcatcagccgcggatacctgcacattttccgtgcaccggaaggaaatgatgccccagagttctatttggaacccgaacagcaggcagcaaccttaaaggggttgcgaaaacaataccgttcttctctgatggctccgttcatcattttggcattccatgcttttatggctgcgcttgttggcggtttattcaatggccgttgggcagcgcagttgtaccgaggattggtagaagaaaccgcatgggtgattggtttctgcctgttcctgctctgggccgtgttcagcgatctatggggttttatttacatcagccgcctgtaa

SEQ ID NO: 778 - DNA, 897 bp, Bacteroides pectinophilus
  misc_feature: SEQ ID N?1985066
atggaaactaatatattgatggaaagtggtacgaatgaattagaagttcttgagtttatggttggtggaaaccattatggaattaatgttgcgaagataaaggagatagttccatatagtaaagtaactccagttcctaattcacatccttgtgttgaaggtgtgtttatgccaagagaccttatgataacaatagtagaccttgccaaggttattaagtgtaatccatcagcagatataacaaaggatatgtttataataactaactttaataagcttaatgtagcatttcatgtggcatcagttgtaggtattcacagagtgtcatggactgatattattaagccagacagcacaataagcagtgctgacagcggtatagctacaggagttgttaagattaatggacagcttattattattcttgattttgaaagaatagtttcagatataagtccggaaacaggattaaaggtatcagatattgataagcttgagggaagacctatgaatgaggcacatatggtaatagcagaagattctccattacttatgaagcttatatctgattctcttattaagtcaggttatgataatttgacattatgtgcgaatggtcaggaagcatgggaatgtcttgccaagttaaaggataccgatgagatggatgttgcctgcgttataacagacttagagatgccacttatggatggacacagacttacaaagcttataaagacagatgataagcttaagcagataccagttgttatattctcttcacttatcaatgaccagatgagagcaaagggagaggctttgggagcagatgtccagttatcaaagccggagataggtttactggttaacgaaatagataagcttcttggaagataa

SEQ ID NO: 779 - DNA, 897 bp, Unknown
  BMI gene
  misc_feature: SEQ ID N?1990443
atgacaacaggatatcttttacataagaaagaaacatttgactggaaaagatatttcacaaggcttgtaactacatacatagtgttcgtagtatggagattaatatatatgtgcgttcaaagtaacatatatgacgaaacacatactgtaagcgaatatataagagcaacattatttgcggcggatataaatggtgtagacttcggggcgctgtggtatatgaaagcatatattgtaatttatcttatatatccggttacatggtttctgttcagacacgatggcaggaagtttgtacttggtatgcttatagtaagcttcataggagatataggcgttggtgcagttaatatattgttatcatattttggcagctttgatataagttcggtgagtacacttgttccatatacgaattatgcttttatgcttacatattttcttataggtgcatttatgcatgaatacagggacgatattaaaaacaagattaacagatatattccggttattttgtttgttgtgggagtgctgcttattgttcttgaaaagtatatagaaacgaaaacaatgagctggaataacatatatcttaataatggatataaaagaatatcggttatgcttgcatcaatagggctgtttatgtgttttaattattacagttctaataaggaaaatgtgtttggaaaatatgtaggccagtgtacaatgggagtatattatatacattatattctactgatattgtgtgtgaaatatatatatccatatattaatatagaaaattattcactggcagctaatcttataaaaactgttgtaatgactgctgtgtgtatggtgataacttgtatagtaagaagaattccattattaaagaaaatggttatgtaa

SEQ ID NO: 780 - DNA, 444 bp, Bacteroides uniformis
  misc_feature: SEQ ID N?1991186
atgatgcctgtaagaagaaaccaaaattggttaccgagtatttttaatgatttctttgacaatgattggatggtaaaagcaaatgccaccgcccctgccatcaacgtattcgaaacagcaaaagagtacaaagttgaattggctgctcccggtattgacaaaagaagacttcaacgtcacatcgatgaagaaaacaatctggtcatcagcatggaaaagaaaacagaaagcaaggaagagaacaacaaggacgaaaagaaggaaggccgctacttgcgccgcgaattctcatacaccaagttccagcaaaccatgattcttccggacgatgtcgataaggaaaagattggcgcccatgtagaaaacggcgtgttgaacattacattgcctaagtttacagaagcagaaaaagaaaaggccaagaaattcatcgacgtaaaataa

SEQ ID NO: 781 - DNA, 309 bp, Unknown
  BMI gene
  misc_feature: SEQ ID N?1994013
atgcgatcattgaaggaattaactcaaaaaagattgcttcctgcttttttggcaatttgtattctgtttggagtaataccaattgctgcggtatctgattatgcgagcgaggccgctctccaaaaattaacgactacagcaacggcaatcacctataaagggaatgtcggaacgggacgctctgcatcattgctcgtagacggcaataaggcatctggcggttctgactatttcgttgttggcaacgatcagatgcaacaaagtaacagttcaaacccgccaaatccagcctattggttacagatggat

SEQ ID NO: 782 - DNA, 159 bp, Unknown
  BMI gene
  misc_feature: SEQ ID N?1995770
atgtccattggacatcgtgtaatctttgagagagatattacacaaagagaactaccgtgggactatggcgcagcggtagcgcaggggactcataatcccttggtcgtgggttcgaatccctctggtcccatttttattttggataatcttcctttttag

SEQ ID NO: 783 - DNA, 171 bp, Bacteroides uniformis
  misc_feature: SEQ ID N?2009592
atgaacatgaaaaagtcttttataggaatcctggcagcaaccatcatcctcagcggatgcggcacaagccagatggctgcaggcgaccctaacgcagtgcttgcaggagctgccatcggaagcaatgtaggcggtgcccccggcggggggggaggggggagggaagggggg

SEQ ID NO: 784 - DNA, 1374 bp, Clostridium butyricum
  misc_feature: SEQ ID N?2021040
gctgccaccacggggggacaggcagagacgacagcagcaccggcagagccggcagcagcaggggactctggtgttctttacagcaacggcggtcctacggagttctttgagacaccgtggctgaatcccggcacctatatgtacaacaagactctctatgcacatctgatttttgctgatgagaacctggcgcctgtaagcggcgagggcgatttggccaagtcctatgagatgtcggacgacggaatgacgctggcctttgagctgagagataatattttctggcacgacggcgaagcgattactgccgacgatattcagtggagtatcgagtatgcactgaaaacaacggtattaaactccgtattccgttccacctttgaagcgttaaagggtgcggcggcttatgaagacggaagtgccgaacacatcgaaggaattgccgttgacggaaataagattacactgacctttgagaaggttgcaccggacgcactgctgacatttacgcagtttgctcctctgcctaagaagtatctggccgatacggatccgatttccttacagcaggccaagtacttccagagccccatcggttccggcccattcatggtggatgaggttcagatgaacaactacaccacgttaaagccgtttgacaagtactacggcggaacggcaaacttcaccatccacttaaatccgagtgcaggcgacagcgacgcgaacttcgtaacgaatgcgaaggcaggcaagctggattacgcttatacgaagaacatcgccgatgttaaggcactggaaggaacaccgggactgaccatcgacaccgtaaacgtacgttatacccgtcttctgtatttaaacaagtttgataaaaaggatgggaaaaaagctcctctggccgatgagagagtgcgccaggccatcgcttacgcactggacatgaagtcgatcttagacggcgttttcgagggggctgcacttcctgcaaacagcctgacaccagacggagcagacaaggtggacggactgaacaattacgattacaatccggaaaaagcaaaggaactgttaaaggaagcaaactgggatccgaatacagagcttgatgtcgtttattactatacagatcagatgacacaggatcttatggcgatcattccgcaggaccctgcaggagtagggaataagatgaacgcaagactggtggaaggcgatctggccaccatcctctggaaagctccggaagatccggttaacggaccgagtgcagttgactgggatatgtgctatgcagccaatgcggcattatccttacatgagtactacgacagataccagaccggttattccatcaactcccatacaccg

SEQ ID NO: 785 - DNA, 639 bp, Clostridium leptum
  misc_feature: SEQ ID N?2023697
gacatcatcaaaaagaccgcgttcaagatcacgcgcatgggccagctcgtcgcgcaggaggcctcgcgccgcctctgcgtgccgttcggcattgtggacctctccctcgcgccgacgcccgcgatcggcgacagcgtcgcggacattctcgaggcgatgggcctcgagcagtgcggcgcgcacggcacgaccgcagccctcgcgctgctcaacgacgcggtgaaaaagggcggcgtcatggcctcctcgcacgtcggcggcctttcgggcgcgttcatccccgtcagcgaggatcagggcatgatcgccgcagcgaagagcggcgcgctctcgatcacgaagctcgaggcaatgactgcggtctgctccgtcggcctcgacatgatcgtcgtccccggcgacatcacgccggaagtaatctccggcatcatcgtggatgaggcggcgatcggcatggtcaactcgaaaacgacggctgttcgcctgatccccgcgatcggcaagagcgtcggcgacgagctcaatttcggcggcctgctcggcagcggccccgtgatggaggtcaacgcgaaatcgcccgccgtattcgtacagcgcggcggccgtatccccgcgcccctgcagagcctcaagaactga

SEQ ID NO: 786 - DNA, 930 bp, Unknown
  BMI gene
  misc_feature: SEQ ID N?2031716
cagggacatgcacatgcattaaacttaaaggaatccggctgtaacgtaattgtaggactttatgagggcagtaagtcatgggccaaggcagaggcacagggcttaaccgtttatacagcagcagaggcggcaaagaaggcagatatcattatgatcttaatcaacgatgagaagcaggccgccatgtacaaggaatctgtagaaccgaatctggaagagggcaacatgctgatgtttgcacacggcttcgcgattcattttggacagatcgtacctccgaagaatgtagacgttaccatgatcgcaccgaaggcaccgggccacactgtgagaaatgagtatgtggttggcagaggaacaccgtgtctcgtagcggttcatcaggattacacaggcaaggcaaaagatatggcactggcttacgcgctggcattaggcggagcaagagcaggcgtcttagagaccacctttaaggtagagacagagacagaccttttcggcgagcaggctgtattatgcggcggtgtatgcgcactgatgaaggccggtttcgagactctggtagaggccggatatgcacctgagaacgcttatttcgaatgtatccatgagatgaagctgatcgtagacttaatcttcgagagtggatttgccggcatgagatattccatctccaatacagctgagtacggcgattacatcaccggaccgaagatcgtaacagacgagaccaagaaggctatgaagaaggttctgacagatattcaggacggtacctttgcaaaggactggctgcttgagaatcaggtgggctgttctcacttcaacgcgatgagaagaaaagaagcagagcatccggctgagaaggttggggcagagctgagaaagctttacagctggaatgacggcggcaagctgatcgacaactaa

SEQ ID NO: 787 - DNA, 330 bp, Faecalibacterium prausnitzii
  misc_feature: SEQ ID N?2046128
accggcgcttccaacgacatcgaacaggccaccaagctggcccgcgccatgatcacccagtacggcatgagcgaggacttcgacatggttgccttggaaacggtcaacaaccagtatctgggaggggacgcttccctggcctgctccgccgagacccagagagagatcgacaaacgggtcgtggatctggtgaagaagcagcatgaaaaggcgataaagattctgcaggacaacaggaagaagctggatgagctggcggagtacctgtatgaaaaggagaccattaccggagaggagtttatgaatattctgaacgctccggaagcgtaa

SEQ ID NO: 788 - DNA, 759 bp, Unknown
  BMI gene
  misc_feature: SEQ ID N?2048454
atgctgaacacaccgtccagtatcattgactggtgtacttcctatctgctgattctgattgtgggaatcatgggagtcgcctattacaatatgttctgcggtatcttaagaggtcttggtgattcgctgtctgctttgatctatctgctgattgcaacggtaatcaacatcattctggatctctggttcgtagcgggcctgcagatgggggtggcgggtgttgctctggctacggtcattgcgcagatggtatccgcggtcctctgtttctttaaactgaaacggatgacggatgtctttgatctgaagttccaatatctcaagccggatatggaaaatatcatgacgatcctgcggctggggcttccgtccggtatcacacaggccattttctccatggcgatggtggtggttcaatcgctgactaacagcttcggtgaaatggtgattgcggccaatgttattattatgcgtgtagccggatttgccatgatgcccaatttctcctttggcacggcaatgaccacatattccggccagaatgtgggtgcaaaggagattgaacgggtacataaaggcgctaagcagggaaccatgatagctgctggaacgtcagcagtgatcacagctctgattctgatttttggcaagtatctgatggggatctttaccaatacctcggagcttgttgcgctgagtgccaatatgatgaagattctggcagttggctatatcgccatggcggtgacgcagagtctc

SEQ ID NO: 789 - DNA, 972 bp, Clostridium bolteae
  misc_feature: SEQ ID N?2052703
atggctaaatatatcttgaaacgcatcttatggatcgtaccagtctgcctcggcgtgctgctgatcgttttcagtatcagttactttgcgccgggggatccggttatgtccatgctgggagccagcgggtatacaccggaaacatacgccagcttaaaacatgagctggggctggaccaaccgttttttgtacagtatatccgttacattgtgaacattgtcacaaaatttgattttggtaattcctatacatatgggcatgcggtcagtggagaaattatttcccgtattggcatcaccgtaaagctgggcgtgctgagtgtaattgtcaccacactgatcggcgttccattcggagtaatatccgccacaaaacagtattcagcgatggattacagcgtcacggcaggttctctttttttcgcggccatgcctaacttttggctggctcttatctgcattatcgtgtttgcactgaagttaaaatggctgccggccaccggaatgggaaactggaggtatatggtgcttccagtcctggcaaattccatgggaactgtggccaatgtggcccgtatgtcccgatcgtccatgctggaggtaatccgttccgattatatcaggacggccagagcaaagggctgcagggaaaatacagtaatctggcgtcatgcgctgcacaatgccgtgattccgattctgacggtggtaggcatgcagttaggaactgtgatggcgggatccgtggttattgaaacgatttttaatatgccagggctcggttcctatcttctgaccggtatctccggccgggattatccagtgattaacgcctgtgttttaattcttgcattctttatttgtatcatgaacctgatcgtagatttgtgctatgcgtttgctgatcccagaatcagctcgcagtacgtgtcaggaaagaagagaaaagctgcagtaaaggaggggtcataa

SEQ ID NO: 790 - DNA, 2322 bp, Unknown
  BMI gene
  misc_feature: SEQ ID N?2058943
atgaatgaacaaactgtattaacgttaccggtagtttgtacacggggcatgattgttttcccagaaaacaggttaacattagatgttggtcgtccagtgagtttaaaggcacttgaattaagtgctaatgaacatgataacaatatcatttttgtctcacaaatcaatccattagtggataatccttcttttgatgatgtgttccatattggaactctttgtaaaattgatcgtaaagtgcgccgtgacagttcgggaactatcaaattaactgttttgggggcaaaaagagttaggctgactaactttgaagaacaacaaggaagtatctactcaactgttgaaattattgaagatgaatttggagatcgaaatgaagaagttgctttagttcgtaagacaacttcgtattttgaacaagcaaaacgcagtatgccaaatatgccgctagattcaatcaatcgattaactagtggagtatcagcaagtgttttagctgacacaattggacaatatttaccaattgatcttaatcaaaaacaaaaaatcttagaaactattaatatcaatgaacgtttattattagtagctagttcaattgaatcggaaaaagtgataggtgaaattgaagaaacgattaatcgtaaagttcgtgaaagtattgatgaaaatcaacgtgagtactatttaagagaaaaacttcgggctattaaagaggaattaggtgatagtgtaccgaaggaagacgatgcagaaacgattcgtgaagaacttgaaaaaaatccttatccacagcatgttaaggataaaattgaagaagaattacgccgttttgaaacaatgccagcagcttcttcagaagctaatgtagtaagaacatatattgactggatgatgaaaacaccttggtatcaagaaactaaagatgttgaagatattcaagcaattgaagatgttttaaatgaagatcattatggtcttgaaaaggtaaaggaacgaattgttgaatacttagcggttaaacaaatgactaaatcgctaaaagcaccaattatttgtcttgctggtccaccaggggttgggaaaacttcaatcgctaaaagtattgcccgtgcactacagcgtgaattcatcaaggcatcattaggtggagttaaagatgaagctgaagtacgtggacatcgtcgtacttatcttgggtctatgccaggaagaattattcaagggatgaagaaagcgggagtaataaatccggtcttcttacttgatgaaatcgataagatgtcaagtgactataaaggtgatccgactagtgcaatgcttgaagttttagaccctgaacaaaatagtcaattctctgataattatttggaagaaccatatgatttatcaaaagtattgtttatcgctactgcaaatgatctaggaaatattccagctccgcttagagatcgtttggaaatcattgaactatcttcatatacagaacaagaaaaactaatgatcgctaaaaatcatttaattaaaaagcagttagctttacacggtttaaaggaagatcaactagtaattgaagatgatgcaattatggcgattattcgtcactatacgcgcgaagctggagttcgtgatcttgagagattgctggcaaagatttgtcgtaaagcggtattaatcgttttaaaagaaaaacgtgataacttaacagttaataaagaaagtttagaaaaacatttaggtaaagcaccatttgaacatactaagaaattagatcatagccaaataggtgtcgttactggtatggcatatacacaatttggtggagatattttaccaattgaagtcaatcatttccaaggatctggtaaatttattattactggtcaattaggggatgtaatgaaagaatcagcatcgattgcattagactatatgaaagctaataaagagaaatatggtcttgaaaaaattgcatttgataaagaagatattcatattcatgtgcctgaaggagctgtaaagaaagatggccctagtgcaggtgttaccttgaccactgctatctactcagcttttaaaaatcagccggttcgcaatgatattgctatgacgggtgaaattacattacggggaaatgtgctgccaattggtggtttaaaagaaaaatcaatttcagcgcatcgttctggaattaaaaagattattatcccaaaggataatgctaaagatattgatgatataccaaaatctgttcaagatgaattagaaatcgtattagctgatcatattgatacagtactagatcacgcacttgaaaaatag

SEQ ID NO: 791 - DNA, 342 bp, Unknown
  BMI gene
  misc_feature: SEQ ID N?2074719
atgtctcagtatcatacacctgtccttctgaaggagtccgtcgacctgctcgccgtagaccctgcgggcacttacgtggacctcactttcggcgggggcggccattcgcgccgcatcctcgccggactgggtcccgaagggcgtctttacggcttcgatcaggactgcgatacgctggccaactgccccgacgacgcgcggttccactatgtggagagcaattttcgcttcctgcggggcgcgttgaggttgcgcggcgttatggaggtggacggcattctggccgacctgggggtctcgtcgcaccatttcgacgccctcgaacggggcttttcgttccgc

SEQ ID NO: 792 - DNA, 828 bp, Faecalibacterium prausnitzii
  misc_feature: SEQ ID N?2079028
atgccgcacatcatcgaagtgaccgacctggccgcgccggagctggacgtctacgcccgcctgaccggggcgcagctgcgaaaccgtctggagccggacaagggcgttttcatcgccgagagccccaaggtcatcgccaccgcgctcgacgcaggctatgagccgctctcgcttttgatggagcggcggcacatcgagggcgacgcgcagcccatccttgcgcgctgcggagagatcccggtctacaccgccgaacgcgaaacgctcgcacgtctgacgggctttgaactcacgcgtggggtgctgtgcgccatgcgccggccaaggctcccgagcgtggaggaggtctgcgcgagggcgcggcgcgtggcggtgctcgagggcatcgtggaccacacgaatgtgggggcgatcttccgctcggcagctgcgctcggcatcgacgcggtgctggtgacgccgacctgctgcgaccccttttaccgccgcgcggtgcgcgtgagcatgggcacggtctttcaggtgccgtgggcacgcatcggcgaggacgccgccgactggccgcaaaagggcgtcgagcgtctgcacgcgctcggcttccggaccgcggcgatggcgctgacggacaactccgtgcgcattgacgacgcgcagctcgctgcggagccgcggctggcgatcgtgctcggcacggagggcgacggcctttcgccgcgcaccattgccgcgtgcgactacacggtgaagatccccatggcgcacggcgtggattcgctcaacgtggcggcggcaagcgccgtggcgttctggcagcttcggacaaaatga

SEQ ID NO: 793 - DNA, 549 bp, Unknown
  BMI gene
  misc_feature: SEQ ID N?2105782
aaggacggcaacgactacatcaccaaatcgacgaccgtggcccaggcgaaccgcgtcatcgccggaagccgcattcccgatctctacgggtcgctctccacgtcgctgcgctggaagaacctcgatttctcgatctcgacgaactattcgatcggcggcaagaactacgacggcgtgtattacgaattcatgagctgctactacacggcccaggccaaacacaaggacatgctgcgtgcatggcggaagccgggcgatgtgacggacgttcccaaatacacgatcggcgaaacccccatcgtcacggacgacaagctggtcgatgcctcctatttctcgatcaagaacatcacgctgggctatacgctgccccggcggtggacttcgaaaatcggcttcaaggcggcccgtgtctcggcttcggtggacaacctctgcatcttcacgcatctgaagggcatggacccgcagtattcgcttaccggcggcacttcgtacgcctatgctccgacgcgcaccgtatcgttcaatctcgatctcaagttctaa

SEQ ID NO: 794 - DNA, 1653 bp, Heliobacterium modesticaldum
  misc_feature: SEQ ID N?2108301
atgacgcagacccgccctgagccgaaagtcattatcatccctgcaaaggaagaaacacttcaagaccagaaaaagaagaaaaatcttcgggtagctgcatactgccgtgtgtctacgaaaaaagatgagcagcttaacagttatgagaaccagagagactactacacagaaaagatcatggcaaatcccaactggacgatggcggacatctttgcggatgaggggattacaggcacttctgcctgcaagcgcaaggatttcctccgcatgatccgccaatgcagaaaaggcaagatcgatatgatcctcgccaaatcggtatcccgcttcgcccgcaacaccgtggacactctgagctatacccgcgagctgcgcagcatgggcatcccggtcatcttcgaggagcagaacatcaattctatctacccggaaagcgaattcctcatcaccatccacggcgccttcgcacagtccgaaagcgaagggatatcctcccgcgtcaagtggggcaagcatcaagcgatgcggacggggaaagcaaacatccagtataagaccttgttggggtacgaaaaagggcctgacggagagatggtggtcaacgcagagcaggcagagactgtccgaaagatttacgagctgtacctatccggtcagacgctgcgcaatatcaaggaaaccttggaaacaggtggatttaagaatacggcaggaacgacggaatggacaacctccaatctgcggacgatcctctctgatgaaaaatactgcggtgacgtcctgctccaaaagaccttcattcgggactgcatcagcaagcaggtcatccgtaatactggacagcttcccatgtatctgattcagaaccaccatgaggccatcatcccgcgggagcggttcgatgcggtgcagatagaactggcgcggcgtcgggcccagaccggcggcacgaaaaagagcgctcccacaggtatgagccgctacagcggcaagtacgcgctcagtggtctgctgttctgcggcgagtgcggcacagcgtaccgcagagtggtgtggacacagcacggcgagaaacgtgcggtatggcgctgcagcagtcgcttggattacggcaagaaatactgcaaagaatctccgacgctggacgaagcgccgctccagcaggcggtgctggcagccatcaacgcctccatgtcggggcgcaaggtattggcagatcagctcgtggatgcgatggagcaggaattggctccggtccccggtgagagcatgagcctcggagacattgaccgagcggtcacggagttgggcaagcagttcgatacgcttctggcagaggcggcaaatggtgatgtggacgaatacgccgagcgtttccgtgctatctccaccacgatggaggaactgaagcaccgcaaggcggctatcctcaacatccggcaggagcaggagcaaatcggccgccgtatccatgtggcagcctcggcaatgaccgcggtgactgtgggaatcacggattgggacgatggcgtagtctatcagatgctggaaaaggtcactgtcctgacgggtaaccgcattaaggccaccttccgcaacggcgtagaaattgaacagtccgtagaccaacctaagaggaggaaattcgcatga

SEQ ID NO: 795 - DNA, 1068 bp, Unknown
  BMI gene
  misc_feature: SEQ ID N?2113638
atgattaaattagatgaagaagctattttaaaaaaggttgatgaaattagagctgaaaaagctgatgcaaaagagttattagcattaattggtggagatgaattagaaaagatattcgagaaatatagtatagaagcaattatagatacattaattcaggaaaagaaaacgcattctttatatgaggatgatgaaaatggattaactgagttagaaggactattaaataaaaaaatcacaggaaagttaggaaaattctatatgatgaaaccagaatatattatatctttaccaccagaagagcaggaacatatggcagaaagtatttctgaaggtaatatagatttaaaaaatgctttgatgacattatggaaaaatgggatagaaacaaaagcatgtggtggagtaagaacaaaagaagaggaaacaccttatatatatgtaaatgtttcattaaaaaatagtgatattttaggaagattaaataatattacccaaaaaggagaaaattatctggatttatgttttgatgcaggagatgatagtttagacattgtaataaaaggtgaaaatgtatatcaagatgtagtagaagaatttcaaaaagaaccacctaaaaaaaacattcttgattttctagcagaagaacaattattaacaagtacagttctagctaagcatatagaaaataatcagcaattaaagtatacagaaaaagatgttgaagagattgtattagataccgcaaaagagcacaaagaacaagcagatagaaatgaagctttattaagagaaaaatatgaaaatgagattagaagattatcaaagaaattagaagaagagaaaaaagaaaatgaagaattatcaggtgcattagaaaaaaaacaagaagaaaaagaaaatttacaacaaaaatatgataaattatatgaaacacatggaagattaaaaaattttattgtacgcaaaataggtaagataccgtttttaggtagaagagttttaaaacttatggagacagaagtaagagctttaccagaaggaaaagatgatacagagagagaatag

SEQ ID NO: 796 - DNA, 1062 bp, Unknown
  BMI gene
  misc_feature: SEQ ID N?2113962
atgattgattataacgaaacaagaggaatttcaaaagaaacattaaatgaattattacaagaattaaacccagactttataaaaaaattaccagatacaccacaagaaatattaaagtttgcaaaaagaagagtaaatccatacatatctgagaatattaatgaaacattagctaaacaaatgttggaaacaagacaaactgacaaggaatatttattaactttgtttaaagctatgactattacatttattaatggtcacgatccttctcaacatccagttgcagctgtattagtatctcaaacaggtgcaggaaagactagtttaagagaattaataaatcctcaaaatcaagtatatgttgttataaatccagatttatataaaaagtatagatctgatgcagacaagattagagaaaaagatagaacacattttggggctttaacaggaatagattcatatgatcatgctgctaatattagaacctatgcgatggaaaaaggatataatattttaatagaagtggctccttcattacaacaaggtttaataggagtagatgaaaaagaattagaagaacatggttaccaattagatttacatgttatggctgttggagatttagtaagtgctatatctatccatcataggtatgaaacttcaatatttgtttataatggtcaaggtgatactaaattaacagatttacataggcatgatgaatcctatttggctgttagcgaatgcttagaaggtatggacccagaaagaataagcttatatattagaggtaaaaatgcagctattcctccgaaaaagataccaacagaaggaaaaacaatgacagaaattttaaatatgctacaaagggaaagatctgtttcaaattatgcatatgtagtaggtagtggagaaccctcttttatatctgattatcaagaaatattacagttaatgcaaaaaagaaatgctccacaagaagaatatgagcaactaaataatatatatggaagatatgtacattataaaagtcaaattaaaagcgcagaaggaaggtaa

SEQ ID NO: 797 - DNA, 411 bp, Unknown
  BMI gene
  misc_feature: SEQ ID N?2114333
atggaaaacgaattagcacaagcatattcagaagtatatgaaatcttaaaatatataccaatggcatatctaaataaaataccaaaagatgtattgaatatttttaaaactaaaagagataaaaactataaagttaatattaatccgaatcttcctttagaagatcaaaaactacataggaaaacattaatattattatctgttttaaatttagattattggtgcgagccagacgaaagggaagaaattttaaacatatattggaaaaatgagaaagaatcttatgtagtattggatgaagagaataatctgataccaaattctgcagatacaagtttagtattataccaagaagaaagttttatagaaaaaatatggagtaaattaaaaagattctttaaaagaagttaa

SEQ ID NO: 798 - DNA, 618 bp, Anaerostipes caccae
  misc_feature: SEQ ID N?2114464
atggatatagaagagaaaaaggctgcgatagaagcaatattatttgcagcaggtagagaagttaaagtaactgaaattatgtctagcttagaaataggagaagaagaagcgattactattttaaatagtttggcttctgattttaatgagaaaaaatctggattaaaaataataagaatggatgactcgtaccagctagcaacaaaaacagactattaccaatatatatatccaataatagataaaagaaacaaacctaatttatctaacgcagcattagaaacattagcgataattgcatataaccctaagataacaagggcacaaatagaagaaattaggggagttaattccgatggtgcaatatataaattattagaatatgaattaatagaaaatgctggtaaacttaatgcgccaggtaaaccagttacatacaaaacgacaaatgaatttttaaagaaatttggttacagtagtttagcagaattaccagaacttccaaaatataaattggacgaaaacgaacaaatagtattagacgagttcgaggaaccaacggaggctcctatgcccgctgagggtgcagaaggagaattaaaacaagaagaaaattaa

SEQ ID NO: 799 - DNA, 1206 bp, Fervidobacterium nodosum
  misc_feature: SEQ ID N?2116380
atgagaatagttaaattatatgggaaagatttattattaaaagagttacaacatagtttgaaatattttattcatgaatcaaatgaaaatggcttaataagggataaaactgtatattcgaaaaatgtggcaagcattgcagcagtaggatatggattagcagcattagtaatttcggtggaaagaaaaataataaaatatgaacaaggatatgaaagagccaatagaactttagatacatttttaaataatgttgaaggggaaaatggctttttttatcatttcgtaaatatgaaaaatggaaaaagagaatggaattctgaaatatcaataattgatactgcaatttttatttgtggggctttatttgttggagaatattttaatggaattataaaaacaaaagcagataaattatataatagaataaattggaaatggtatgtaaaccctaaaactaattatttttttatgggatataaaccagagattggtttttggggtaattgggatatgtatgcagaacagttaatgctatatattttaggagttgcttcagaaaaatatccgattaataaagatatttattatgaatttaaacgacctaaaaaagattataaagacataaaagatataatattttcatatggcgggagtctatttacatatcaatattcgcatgcctggatagattttaatggaaaaaaagatatagaaggagtagattggttcgaaaattcgagaaaagcaacattagcaaatagagaatactgtattaataatatggataaatttaaaacatttaatgaaaactcctggggattaactgcaagtgttggtccaagtggatattctggcgggtatggcgcattacctagtttttctaatttagatatagaaaatgatggaaccgtagctccttgtggtgcaataggttcgatagtttttactccaaaagaaagtattaaagctttagaatttttttacaatgagtgcccatatttatggggaaaatatggattaaaagatagctataatttggcaaggactaagagatgggtggcaaaagaatacttaggcatagacaaaggaatagaagttttaatgatagaaaattatttaacaggttttgtatggaaatatatgatgaaaaataaatacatacgaaatggattaaaaatatggtcaattgaaaaagtaaaatat

SEQ ID NO: 800 - DNA, 477 bp, Unknown
  BMI gene
  misc_feature: SEQ ID N?2116496
tgtagcaatactataaaaggagtccttatgatagttgaaaataaatatttggaagatataaaaagaatttggaaggaaaacaatagcggatatattactgaagaaagtaatgaaatgttaataaataatgatgatatattaaaaatagtgtatttagaaaataatgtgccagctggatatattgcagtatatactaaagatgatttttgtaaattagaaaatttcccagataaaataggaaaagaagaaaatgtagcatatatatgggaaatagtaacagacaaaaattatatgggaaaaggaattgcaagtaaacttatgcaatatgtgttggaaaaatttaaaggatataaaatatatagttgtattgcaaaagataatataccatcactaaaattacatgaaaaatatggttttaaggaggcatatcaatttacaaatgataaagagcaactaatgctactaaaaaataattag

SEQ ID NO: 801 - DNA, 546 bp, Unknown
  BMI gene
  misc_feature: SEQ ID N?2116828
gtaggaggtaataatatgaatatatggcacgatatatctgctgatagaataaaaaaagatgattttatagcagttgtagaaatagaaaaaggtggaacaaataaatatgaattagataaagctactggtctgttaagattagatagggttttatatacagcgacacactacccagcaaattatggttttatacctagaacatatgctggagatggagacccattagacgttttggtaatatgccaagaaaagatagttcccttaacattagtggaatgttatccgataggtgtaatgctaatgacagataatgatgatttagatgaaaaaattattgcaattccaaaatctgatccattcttaaagaattgtaaagatattaaagatttaccagaacaatattcagcagaaattatgcatttttttgaagtatataaacaattagaagataaaaagacagaagtaaaagaaatgcttggaagagaagatgctgaaaaaattatagaaaaatgtataaataattataatgaaaagtttttaagataa

SEQ ID NO: 802 - DNA, 360 bp, Alistipes putredinis
  misc_feature: SEQ ID N?2117205
atgcgtgcgatgttcactcccgacgatattctctacgaagacaaccatttgctgatcgtcaacaaacgctgcggcgacctggtgcagcccgacccttcgggcgagagcgcattggaggaccagatcaagggcttcatcaaaaaacgcgacgccaagcccggcgaggtgttcctcggcgtggtgcaccgtatcgaccgcccggtgagcggggccgtcattttcgccaaaacgtcgaaagccctcgcgcggctcaacgagatgatccgcgaaggccgcatccacaaggtctactgggcgctgaccgaggccacgcccgaccccgagagcggcgagctgtgccactacatcctgcgcgacggc

SEQ ID NO: 803 - DNA, 234 bp, Unknown
  BMI gene
  misc_feature: SEQ ID N?2125968
ttgaagcccggctcaaggcctgaattttcaacacaaaaacaacagaatggtgaaaaacagaaggagaaagagaaggagaaggaggtcatgaacaagacccggcaggctccctcggcacggcgcatcatcggcatggtgatgggtgttatcatcatcgcccttggccccttcatccagttcttcgatggacatttcgcccagaaggtgctgaaatataaacaagaaaaggaataa

SEQ ID NO: 804 - DNA, 261 bp, Unknown
  BMI gene
  misc_feature: SEQ ID N?2129464
atgcatcagcgtcggcaggtagtagttgtcgttgatggttttgtcgcgctggattggctgccgtccggtgccgcaaataaaaaaacacccgccgaactcaaggagtccctggcgggtgtaaggttcgtggctgccataggctgtaagaccggctgggaaagaacaatgccgcgtcttgatggcgtagtagccgtgatcgatgccaatgttcatggtttttgcctcgctttcgttgtcgttgaaatttgcggatctatgtaa

SEQ ID NO: 805 - DNA, 696 bp, Unknown
  BMI gene
  misc_feature: SEQ ID N?2129825
atgaacggctttgaaaaatatatgctcgatcagtttccgctgcgtgacggctttagaacactcaaagccgccgcaaatgcaaaggtgtttatgcaaaaggataacaacggattatattccgtcggagagcacctatcaaagctggattttccgacggacttcgactctgtcgatcatgccgctcggcgctttcggtatgtgtatgacgcatatcttcggaatagcggaacaaagacatatctctcggtgatacccgataaaaatgtctttatcgcatcgccaaacggttatccggacaaggattacaaggctcttgtcgaacgtctcggaaaaggatttccggaggcagagtatattgatatttcagggcttctgtcggctgatgatttttattacaccgattctcactggcggcaggaaagaatactgacggtctccgacgaaattgcagataaaatgggcgcggagcggataggacagtgtgaaaagcatgacacgggcgtttctttttacggcatctattacggccaggcagccctcccgcacgcaccggagcgttttttctatctcgataatgcggtgatacgaggccttaaagtgtataacgtcgaaacctcgtccgatatcccggtttatgacctccgcgctgccgcaggcagagacccttatgaaatgttcctcggcggcgcgcgctcg

SEQ ID NO: 806 - DNA, 537 bp, Unknown
  BMI gene
  misc_feature: SEQ ID N?2130465
atgagcattttacagacgattaacctcaaaaaatattacggcacaaaacctaatattacccgtgcccttgatggagtgaattttactgtagaacagggagaatttgttgctgtggttggaacttccggcagcggaaagtctacactgcttcacatgatgggcggacttgataaccctacttccggcagtgtgattgtccggggtgaagaactggcgaaaaagaatgatgaagaattgacaattttccgccgccgcaatatcggctttatcttccagaactataatctggttccgattttgaatgtgtatgaaaatatcgtcctgcctgtggaactggacggcgacacggtagatcagaaattcatggacgaggttgtgcgtatgctggctttgggcgataagctgaagaatatgccgaacaacctttctggcggccaacagcagcgtgtggctatcgcccgtgcgctgattacgaagccagccattatccttgcagacgaaccgactggaaatttggacagcaagaccagtgccgat

SEQ ID NO: 807 - DNA, 396 bp, Unknown
  BMI gene
  misc_feature: SEQ ID N?2140646
atggcattttttgaggatctgagcaggaaggtacaggacgtcgcgtttgccgcggccgaaaagggcaaggaggtcgccgccatcgccagcgagaaggcgcaggacgccgccgacaccgtcaagaccaacgtcgccatcgccggcgagcagcgcgccattgagaagaactaccgcgccatcggcgagtggtatgtttccgagctcaagggcgaggctcccggggcggtcgccgacatcgtcgccgccatccgcgccagccaggcgaagatcgccgcgctgcagggcgaggacgcgcccgtcgaggccgaatgtgccgacgtcaccgaggccgctcccgccgaagcgccggtcgaggcgcccgctgaagcgcctgccgaggctcccgttcaggagtaa

SEQ ID NO: 808 - DNA, 1662 bp, Erwinia tasmaniensis
  misc_feature: SEQ ID N?2149404
atgtacgaaaacggtaagatctacatgggacttgcggacggcgcgcgcgtggagcttgcgctcaatatgtgcaaccgccacggcctgatcgcgggcgcgagcggcacgggcaagaccatcatgatgaaagtgatggccgaaagcttttccgacgcgggcgtgccggtgttcctgtgcgacgtcaagggcgacgtcgcgggcatctgcgcccccggcgtgagcagcgagggcatggaaaagcgcatcgaccgcttcggtctgcgcggcagctttgcctacaagggctatcccacgaccttctgggacatttatcagaccggcggccacgccgtccgcgcgacggtgagcgacatggggcctgagcttttgtcccgcatcctcagcctcacgcccgcgcaggagggcatcctgcacatcatgttccgcatcgcggatgacaaggggctgctactcctcgatctcaaggacctgcgcgccatgctgaactacgtcagtgagcaccgcgcggagtacatgatgacctacggcaacatcacgccgcagtccgtcgcggcgatcctgcgcgcgctgctgccgcttgagcagcagggcggcgacctctttttcggcgagccggcgctcgacatctatgactggatgcgcaccgacgcggacggccgcggcatggtcaacgtgctcgactgcgtgaagctggtgcagaacccgacgctctacgcgagcttccttttgtggatgctctcggagctgtttgagagcctgcccgaggcgggcgatctggaaaagcccaagctggtgttcttcttcgacgaggcgcacacgctcttccgcgacgcgccggcggtcctcgtgcagaagatcgagcagaccgttaagctcatccgctcgaagggcgtgggcgtgttcttcgtgacgcagagcccgagcgacattcccgacgcggtgctcgcgcagctctccaaccgcgtgcagcacgcgctgcgcgcctatacgcccgccgagctgaaggcggtgcgcgttgcggcgcaggccttccgcgccaaccccgccttccgcgcggaggatgccatcatggagcttggcgtcggcgaggcgctgacctcgtttttagatgaacagggcgtgccgaccatcgtgcagcgcacgaagatcgtctgcccgcagagcctcatgggtgcgcccgagccgatggcgcgcatgaaggccatgctgcatgacggcatggagaagtacgacgacgcggcggataatctctccgcctacgaggtgctgaccgagcaggctgatgccgcggcgctggaaaagcagcgggaggaggagcgtcttgcgcaggaaaggctggctgcggagcaggaaaagcagcgcgccaaggaggaggccgcggcggaaaagcagcgggcgaaggaggaagctgccgaggaaaagcgccgccagaagctggaggatgaggagcgccgccgcgcacaaaagctggaggacgaggcgcgccggagggcggagagggccgccgaggccgagcagaaaaagctcgagcggcagcgcgagcgtgaggctgccgcggcaaagaaaaaggccgagcggctccagtccaaaatcgagacgcagctcatctccgcgggcgggcggatcctcaggcgcgggcttctgggcattttgaaacggtaa

SEQ ID NO: 809 - DNA, 381 bp, Bacteroides pectinophilus
  misc_feature: SEQ ID N?2151597
atgagaaaagaacagattattacgacaaccaacaacaatcagatggaggaaaaaggtatgaagcagagatttattcattttaagagaaaatttgttccggcattatccggagccattatgggagtaatgcttatgagcactacttgttttgcagcaggtacaggtacttccgcagtaacacagccgcttgagaatttaaagacacttatcattgcagtcattggtgctgttggtgtcatcattcttgcaaagaatgtcatggagttcgcacaagcctatcagcagcaggattcatctactatgaactctgcactgaaaggaattgtagcaggtgtcatgatggctggtatttcaacagttctgacattcttaggcttctaa

SEQ ID NO: 810 - DNA, 369 bp, Unknown
  BMI gene
  misc_feature: SEQ ID N?2170295
atgtacagtattgattttgaaaacttacataaggcggcggagatcatctattgttttatgacgcttcctgctttgacaaagcctgagtgtacgctttggaatgacgatgggtttcccgataccgtaacaaataccggcaagggctttatgagtgaagagaagttttgcaggtggattgttaactccgattttgctgcgatttcttgcgttgcatctacagataaggaggacagccggcgtgttgtattgaatctgatgcccggagcacggtatatgacacttaatttccctatgtcttcgggcgcacctagcgaagcggaaaaacgattattagatatcttggagaagtatgatgaacatgaaaattga

SEQ ID NO: 811 - DNA, 612 bp, Heliobacterium modesticaldum
  misc_feature: SEQ ID N?2175616
gcaccccagcacaattacttattcctgaccaagaacccaggccgctaccaggcccttgcagcagcgggaaagctgccggaacttccgaacttctggtatggcagcagcataacgggcccggaaaacagtttttggtggagtgaataccaccacacctttgtgagctatgaacccatgcttaaacccctgggcattgcagacggggacgccgccgcaaaggttgactggattatcgccggagccgaaaccggacacagggcggggaagatcaccccagaagaaggctggctggaagaacttgcagccgcagcacgaagggcaggcgtcccgctttggatcaaagacagcgaggagatccgcgctgtgataggtggagaaccggcccaggccttgccggatgcgcttaaacgccccaaggaccgccccacgccgcgctgcgccgagtgcgagcactgcgttaagacccgggaggggcagagaggcacccggaaagaatgcgccattggatggacagccgagggctacgaggacggaggcgcccgccatattccgaccagaggaaaccgccagtcgcccgactggtgcccgagaagaaaggacgatgcagaatga

SEQ ID NO: 812 - DNA, 999 bp, Bacteroides pectinophilus
  misc_feature: SEQ ID N?2184781
atgtcacaagaaacaacaaatgaaacatatcagccaatgacatttgattctatcaagattggtcttgcttctccagagaagattatggagtggtctcacggcgaggtaactaagccggagaccatcaattacagaacacttaagcctgagaaggatggattgttctgcgagagaatctttggaccgagcaaagattgggaatgtcattgtggaaaatataagaagatcagatataaaggcgttatctgtgacagatgtggcgttgaggtcactaaggccagcgtacgtcgtgagcgtatgggacacatcgcacttgcagctcctgtttcacatatctggtattttaagggaatcccaagccgtatgggtctgattcttgatatttctccacgtgtacttgagaaggttctgtacttcgcttcgtatattgtgcttgacagaggtgagactaatcttgccgataagcagatcctttcagaggcagaatacagagaagcatgcgaccagtacggaagcagtgctttcagagtaggcatgggtgcggaagccattatggaacttcttcagaagattgatcttgagaaggattcagcacagcttaagtcagaacttgcagatgcttcaggacagaagagagtaagaatagttaagagacttgaggttgtagaggcattcagggagtcaggtaataagcctgagtggatgatacttactgcaattcctgtaattccaccggatttaagacctatggtccagctcgatggtggacgttttgctacatcagatcttaacgatctttacagaagaatcattaaccgtaacaatcgtcttgcaagacttaaggaactcggagctcctgatatcattgtccgtaatgagaagagaatgcttcaggaagcagttgatgcgcttattgataatggcagaagaggacgtcctgtaacaggtccgggtaacagagctctgaagtcactttcagatatgttaaagggtaagcag

SEQ ID NO: 813 - DNA, 1221 bp, Unknown
  BMI gene
  misc_feature: SEQ ID N?2185209
atgaaaaaatggacgaagctgtttgcggtgctggcgctggcagtgatgttattgctgactgcctgtgatgacggcactaccggtggcggttctggtggcacttctggtggaaactggggaaacggcggtggcaacaccaccggcggcggtacgggtaacactacaacggataaagaggatgacaaacctaccacttccagttcagtgttcctgaccgcactgaacaaagcttataaactgccagacacgtttgatggctggcaccttatcgtggatgatttcgatggcgatggccggcaggaagcgtatgtgtttgccggtcgaccgtcaggagaccagtggtacaatatttcggttttctatgttgacccgaacggaaagatcactgagatcctgaagaacagcggcctgtatggtgcgccgcaggaaacaaaaagcacaagggataccagttttgcaagcagctgtttccgctataaaaatcaaaagtttgtcagcttctggcttgcaccgcaggatggctgcgtctatagcgaggtgtatggtgcatataatggcagagcaacaaagcttgagattgacggaagcgatgtgagaaagacaccggaaggctttgtatatgcagcgggtctggatgttgaatatgcctatgtccttaaaaacggaaggcttgtggatatgttcaccacaccggatgcttataagtatgtagacccggattacagcatgaaaacaacgccgctcaagaccgcatggaaaaactttatgaacaacgttgaatttggcaatgcagagtacttcctgcagtatgactttgacggcgatggccggcaggaagcctatgtgttccgtggaacgttcaatgacggatatgcacagaatgcagagatctattatatcggttggggcggtacgatcctgcgcatggcatacagcagtggacagctttatcaggtcaaccaatggggctatacaacggatgattctatgatcaaagcgggcaatcagcgctttgcactgtggcagatccccggcgcagggcacgcggccacccgcgtgtttggcgcacgcaacggtgtgccgtatgagccgcagatctccggcaagctgtcgtatttctatcaggaagataatggccggttctatgctgaaagcgacaccaagtatgtggatgatgagtatctgttcaacgcatccaccggcgaattttacaagagataa

SEQ ID NO: 814 - DNA, 1296 bp, Unknown
  BMI gene
  misc_feature: SEQ ID N?2196550
atgacagtaaaaacttatgatgttacagaagaaatgctacagaggctctatgaaggacaggtctttaagagctttcgcgatctgtgcttacagtggaatctcttgaataacaagggcgaacccattggagggaacagcaaaaagcagttcatggaagagcttaaccgttttgttcagatagaaaaagtagggcagaagctgattgtcaagcacattcggacgaaggacgaaatcttgccagagcgttcagagggtggaaatatcaagtacagtaaactgatccagcaagcgttggtataccatttttggtatatgtggaaacgatgggatgaactgtacaaaggacatggcggatgtctgggcttccaaattctctggtgtgcaaaggatatgatgtattcttgccggatagtcaataagcattttacgaattatggaagaaatggagagatggatgagaaagagaaggagaacggtagttatgcagatgcgttccgacgtatcgtactccctaagttctctagttacatcaaagctgcgctgaactcaatgagcaaaaacaaagaaattgttttggctaagcggacgtgttttatcaaatatagtaaagaagaaggaaataagtggataattccattaacagcagaagaaaaagtggagtatctaaaaattgtagatgagacacttcgtagttatagaaaagcaggcggcggtgtggcgactttgcaggcaatctttacgtatggcaaagcgacagatttttatggaacgcttcgaaaaaagctgaaggataaatttggagaggattgcagatatattgaagaggtatacgatataacagtagaaccgggagcgctagagcacgcaatgtgcagactgggaaagcctgaaacttacagcgatgagctttttacggagttgaacagtaagatctgtgaaggcttgatcaatatgaaaacgatggaaaaggagcagttgacagcaacacggcttcgtgattaccgagagagttatcggacaaataatacgcagataattgatggagaacaggtatattggggagataattcggctttggcgaagatgaaaaaagagttctattttggaaagatcgtattggatggtgataagacaaagctgcttgttgacaagatgattcgagaaacagaatggcaagagcagaggtgtccaaggttggaaggaaaagagtgttatcctgaaccagcatattatcaggtagtacgcttataccaagatgaaagccaagtgcaggaaagtgcaccgtggttctattaa

SEQ ID NO: 815 - DNA, 210 bp, Clostridium nexile
  misc_feature: SEQ ID N?2232932
ttgaaaattcctgtttttgaaaccggaaaatcggaagctgagggggatagactattgagaacatatgagaataaagacgaacttaaaaacgagataaataaaagctttgcaaaatatatttcagaatttaatgatattcctgagcatttaaaagataagagagttgatgagatcgatcgaactccagctgaaaatcttgcttatcaggtc

SEQ ID NO: 816 - DNA, 570 bp, Unknown
  BMI gene
  misc_feature: SEQ ID N?2236205
gatattcaggcaaaattacaggcggggaaaggcgctgggtatgcgcgctgggccaaggtttttaacctgaaacagatggcgcagactgtaaattttcttaccgaacatcagctgctggactatgcggagctggcagaaaaagcggcggcagccaccgcccaccacaacgaactgtcggcacagatcaaggcggcggagaaacgcatggcggagatcgccgtcctgcgaactcatatcatcaactatgccaagacccgtgagacctatgtagcctaccgcaaggccggttattcccgaaaattccgggaggaacatgagcaggaaatcctgctccatcaggcagccaaaaatgcctttgacgagatgggtgtgaagaagttgcccaaggttaaggacttgcaagctgagtatgccaaactgctggaggaaaagaagaaaacctacgccgagtaccggcgttcccgtgaagaaatgcgggagcttttgacggccaaagcgaatgtggaccggctgctgaaaatggacgaggaacagaaaaaggaacaggaaaaagaccacggccagcggtga

SEQ ID NO: 817 - DNA, 1386 bp, Unknown
  BMI gene
  misc_feature: SEQ ID N?2237516
atgaaaaaaattttcattgtattacttttgtttgaacgattattcgcgtgtgctcaaaattctgttatacaatattatactcctaatccaggagttcaaaaagcatttgttttgtatgataatgattctttgatcccaacttatgaacttccaaatccgttagtgcttgaaagtggtcaaaaagtggtggactctattatgtggtggcgacaaaggcgccctgaattattgtcactgtttgagaatgagatatatggtaaaactccatttttttcgcaggcagcccccggttttttgcaatatccagttgttcgtgttttaagcgaaaaaaaagatgtttttaatggaaaagcaactcgtagagaagttcggctatgttatactcaaaatgatagtagttactatttggatatattactttatttaccgaatcatgtaaaaactaaggtgcctgcttatgttatgttgaactttcggggtaatcaatctgtaacagaagatactgatattcatatttgtgaatcttggatgaccccttgtagtgatggttcggttgtaaatttccattctacggaaaagtcacgtggaattgcaaaatctcgatggccaattgaaatgattattgatcggggatatgctcttgctactgcttgctatcagcagttagttccggattatgaatcagattctccacagaaaatacattctttgttttttcgaaaaggacagattgcttcagcttcgaacgaatggggaagcattggtgtatgggcatggggaatgtctcggatattggattatttggagactgagcctcgaataaatcctcggcaggtagtagctgctggtcattccagattgggaaaaacagctttatgggctggtgcacaagaccaacgttttgcgattgttatagcaaataactcggggtgtggtggaggtgcattgtcaaaacgtattttgggagaaactatagatcttttatgttatgttcgtccacattggttttgtgataattttaaatattatgctcgaaatgaaaagcttttaccgatagatcagcatgagttgatagctttgatagctccacgtccggtttatcttgctgtggctgaaaatgattgggccgcagatcctaaaggagaatatttgactttattgaatgtagatagtgtatatcaatttttggggagtaatggtatagggaaaaaagatcgtaataatattttattggaaaagggttctttaatttatgatgcacagatgccaagaataaatcaatcaacaggagagactattggtttccatattcgtatgggaaagcatgatataacgaaatatgattggggtcagtttttgaattttacagataaattttttaaatga

SEQ ID NO: 818 - DNA, 1371 bp, Parabacteroides distasonis
  misc_feature: SEQ ID N?2237522
ataagaattaccgaaattgcgaggggtaatcctttaccttcaacactattgttagagagggtttggaatcatagacttcaaatagcgatatcaagatgtaatgttttactgcaaaatattacattggaaactcctttgattcaagctggcggtgcctatgtgtcaacggaagaaaaggctcgttggattgcagaagcccattttttgagggccttttattattttgatttaatgatgatttttgcgaatgtacctataatagaagaacctttaaacgtaattgataaaacaactattacaaaggctcctatggaagaggtttatgattttattatgaaagatttagagactgctttggcagaggaaaatctaccaagtgtcaaagagttatctacagatgaatttggcagagtaactcgtgaggctgtgtattcatttagggcaagggtcgcattgtttaataaggattatgcgttggcaaagtcagactgtaagaaggttatagattccggagcatatgaattagttccaaattacgaagatctgtttaatagtgtggaaagaggttatatgtctaaagagtgtatttttatgacttataacagttataatcctccttattgtaatggaaatcctgctttgatttattttgttgggcgtggtgttactggcggatggggaggtgaggtccctacctatgatttggtgaatgaatatgaggtaaaggatccacgtaaagtccatacgattttgtctcatggagatattttccctaagaaagatggaaacgaggaagtacatgattatacaggttatgataattttacaaaattacaaagccgtaagcattatgtagatcattttagaagacctgatgcgggactgaaacaaacagattggtcatattatcatataaggtatgcagatgttttattgatgtatgcagagtcactgattgaattaggtgaaaatttacaagaagcggttgatgtaattaataaagttagagaaagagcttttttgacaacatctcctacggatagttatgcaacttacagatcatttaatatagcagagcctataacaaaagaagagtttgaaaaaaattataaggttaagatcagcgatgacttaagaaaagttgttcgacatgagcgtagagtagaattggcagcagagggtttacgatattatgaccttatgcgttggggaatttttgtggataaaatcagggatttttataagactcctgaaggaattgccacagaaaaaggttcgaatatttcagaaaaaacatggccttatccaatacctcaagcagaaattgataaagtcggaggatctttagttcaaaatgataattataaataa

SEQ ID NO: 819 - DNA, 693 bp, Unknown
  BMI gene
  misc_feature: SEQ ID N?2257924
atggaacgaatcttagtggtagaggatgacctggctttgagcacaggtctttgctttgagttggacaatgcaggatatttgaccgtggccgcatataactgcaccaaggcgcggtatctattggaacacgaaagcttttctttggcacttctcgatgtgaacctgccggatggaaatggatttgatttgtgccgggaaatcaaggctgtacggccggaactgcctatcattttcctcacggccaatgatcttgaaacagatgtactgaacggctttgatatgggggctgacgactatgtgaccaagcccttcaacatgcagatcctcctgcggcgggtggaggtggtcctgcgccgggcaggtgtcaaacagcccgcgccccaggctgaccgctggagcgacggctggctgacgctggacttctccgcgctcaccgcccagcggggcgaggaaaaactggtcattacccccaatgaatataagctgctcaagaccctcacggagcacagcggtcagattcttacccggcaggtactgctggagcgcctgtgggacagcggcggcaacttcattgacgaccacaccctgaccgtcaccatgaaccggctccgggccaaaatcgaggatgaggcccatacctatatcaagacggtccggggcatgggctacatctggacgggaggcaagccatga

SEQ ID NO: 820 - DNA, 552 bp, Coprococcus comes
  misc_feature: SEQ ID N?2258899
atgttaaaaaccgaaagattgttgctgcggaaatggacggaagcggatgcagacagtttatttcaatatgccagtgacccggaagtgggccctattacagggtggccgccccataaaagtgtggaggaaagcaaagagatcatccgcaatgtgttaaatgggccggagtgctacgcaatttgcgaaaaggaaaataacattgctatcggctcgatagaattgtgcttaaacggcaataccaacatgacaacgcgcgacgatgcgtgcgagctgggttattggcttggtcagcccttttggggcaggggctatatgccggaagcggctaaagagttactgcggcatggatttgaggaccttggcatggaagtggtctggtgcgggttttatgacggtaaccaaaagtccaagcgcgtacaggaaaagctgggctttgtttttcaccatacctgcagtgaggtgccggtgccgcttctccatgaaacgcgagtggagcatgtaaatgtgatgacaaaagaacactggggaaaatgctgtgcaggcagatgctga

SEQ ID NO: 821 - DNA, 312 bp, Unknown
  BMI gene
  misc_feature: SEQ ID N?2267893
gtaaatcagcgaattccgaatgttgcagaattgcgagagcggcgaagctgcggagcaattctgggatatcaaaaaaagaaagaaagctcaaacattgttcgtgctggcacttctttctgttctacggttgagtctatgaaacagatatcggagaactatctgaataatgaaaaatgttatgtgaatgactgggcagcatatatatcatcagtcggaatgacaagagaagaggttattgaatatatttctaagactaatacacagccggaaagacaggaggcagcattatgtcaatctttaaaaagaacttag

SEQ ID NO: 822 - DNA, 747 bp, Unknown
  BMI gene
  misc_feature: SEQ ID N?2270184
gccaaagggcaggagggaaaaaccattacagagcataaagaaaatacacagtctgccccggcaggtaaaaagacgaatctgcacgccgggcatcgtgaccgcctgaaaaagcgttttgatgcggtgggagaaagaggctttgaagatcacacgctgctggagctgctgttgttttatggggtgccgcagaaggacaccaatcccattgcccatcggctgatcgagcggttcggcagtctgcctgcggtactggaagcgcccgcgcgagaactgatgcagatcgaaggggtgggagaaaatgtcgcaaggctgctcaaggtgacccaggcaatgcgctgtcgctgcacccagcagcaaactgcccgccaaaaggtggtgctcaattcctccttgaaggcgggagaatacctctgctctctgctgcaaggcagagaaaccgaggcacttttgctggtctgtctggatgcgggaaaggcggtgcgccactgcgagcagctggaaagcggtgtttcggacagtatctctaccaccctgcggcagatcgcacagctgtgtgtcaaccgcaacgtccatgacatcattttggcgcacaaccatcccagcggtctggtgcatccctcgcgggaggacatcgtgatgacccgcaaggcgcaggattttttacaggaaattggagtaaacctgctggaccatttcgttataaccgataaggaattttattcaatgaaggaccataggcttttttaa

SEQ ID NO: 823 - DNA, 243 bp, Eubacterium siraeum
  misc_feature: SEQ ID N?2274518
atgaatgtaaacacaaaatctcttgtttcaatcacagaagcaaatcaaaatttttctaaggttgcaagattagttgatgaaaatggttcggcagttattctgaaaaataatattcctcgttaccttattgttgaattcagtcaggcagaaaacgaacagattgctgttgatgaagatgttatggatatttcaaaaaggctgattgcaaaaaataaaaaagcctatgaggttcttgcaaaatga

SEQ ID NO: 824 - DNA, 1500 bp, Clostridium phytofermentans
  misc_feature: SEQ ID N?2275783
atgcatatgaagatagattccctgtatatagaaaattttaaatccatagagagcgcacagatcaaggaaatcgacaatgcatttatccttgtgggaaagaataataccggtaaaagttccgttatagatgctgtaagggcgggactcgggggatatacgatccgtcgggacaattttcgtgataataccagagatgtcgtgattcgcatgacattgtccgaagaacttgatgcgagtgaccatgtcctgatccggcaggttacttatgtagttacaccggatggcagatattattatgaggacgaggacggaatgagtgagaaaatgccggaatatctgccaagactctattacatagatcacagaagaaatctgcgtgaattccagagtgcattgctcgatttgcagggggatgcatccattaccatgttaaaagaaaagaaatgtccgtatcagaacgacaagatctgtgatgaatgtttccagtgtattcctgagatagagaaaaaaacaggtgcggagctgaccatatttgagactgcaaagttgatggaataccggatgtataagatgaatctcgataaattctccgacagtgtcaacaaatatctgaagaaaaacggcatggtaggatatcagatccggtacgaggtggatttggatatcgacagtatgttgaattttgatacggttgtctatcagagagaccgggaagtgaaagggacgctgtccatgatgggagccggaagcaagagcatatacctgctgtccctgctggaagcctatgtggaagaaaacagccaggacggaggaatcatcatgatcgaagatcctcagatcttcctgcatccgcagcttcagaaaaccgcgagtgagattctttaccgtctgtcaaagaagaaccagatcatattctcaacctactctccgaacatgatatttaatttttcttcaaagcagatcaagcaggtcgtattagatgagaactgcagtactttcattcaggaaaatatcgacatagacatcatcctggacgatctgggatattctgcaaatgatctgatgaatgtcagttttgtctttattgtcgaaggaaaacaggacagaaacaggctgccactcttactggagaaatactattctgagatcagggataatgatggaaaacttaaaagaattaccatcgttacgacaaacagctgtacgaatatcaagacttatgcgaatctgaaatacatcaacaagctgtatctgaaagatcagtttctcatgattcgtgatagcgacggaaagaatccaaactaccttatccgccagctgtgcagttactacaaggcgagatccaatgaagaaggtgcggatctgccgaatgtaacaccgaaaaatattctcattttaaaatattactcatttgaaaattattttctcgatcccgcaaccatggtaaaaatcggagtcattaaatctgaagatcagttttatgacatattgtacaaaaaa

SEQ ID NO: 825 - DNA, 423 bp, Unknown
  BMI gene
  misc_feature: SEQ ID N?2275807
atgttacagcctaaaaaaactaaataccgcaaaatgatgaaaggcagaatgaaaggcacagaaaccagaggaacacaattagaatttggcggatatgcaattcaagctgttgaacccggctggattaccagcagacaaatcgaggctgcacgtcgtgcaatgactcgtgaaatcaaacgtggcggtaacgtttggattaaaatattcccggataaaccgattactgcaaaacctgcagaaactcgtatgggttcaggtaaaggtaacttggaatactgggtagcagttgttaaaccgaacagaattctttttgaacttgattatttcgacagaaatgttgcagttcacgcattagaattagctgctcagaaactgcctattaaagttaaaattgttgaaaaagcaaaattagaaactaaataa

SEQ ID NO: 826 - DNA, 108 bp, Unknown
  BMI gene
  misc_feature: SEQ ID N?2277019
attttactgttcccctttctttttgaatatgtctacacagttcatagtgttagcttaaataatgccgattatacaaaagcggttgtaaactttccaaaaacgcattga

SEQ ID NO: 827 - DNA, 672 bp, Faecalibacterium prausnitzii
  misc_feature: SEQ ID N?2278234
atggcggaaaagtgtattgaactggatagtgtagagatcgcagcggctgtttttggcaactgcgaccggaatattcgcttattggaaaaagagttttctgtcaccgccgtctgccgtggcacacagctgcgcatttccggtgagcctgccaacgtggcggcagcgaaccgagccgtggagggaatgcttcttctgatcgagaaccgcaccccgctggaagatcagactgtgcactactgcatcagtttggcgcacgatggcgcggagaagcgggtaaaggagctgaccgaggattttgttactgtcacggtcaagggacgaccgatccgccccaaaacgctggggcagaaggaatacctgagtgccatccgctccaatgccattaccttcggtgtcggcccggcgggtaccggcaagacctatctggccgtagctatggcggtaaaagcctttaaggctaaggaggtctcccgcattatcctgacccgcccggcggtggaggcaggggagaagctgggctttttgcctggcgacctgcagcagaaggtagacccctatctgcgtccgctgtatgatggcctgtttgatatgctgggcgcagaaacctacgagcgtctggtggaaaagcagatcatcgaggttgctccgctggcttatatgcgcgggcgcaca

SEQ ID NO: 828 - DNA, 642 bp, Unknown
  BMI gene
  misc_feature: SEQ ID N?2278691
atggcaaagaaatcatacgcagacagaaatttaaaatttgaaacattacagttacatgttggacaggaaagtccggatccggttaccgatgcaagggcagtaccgatttaccagacatcttcctatgtgttccgcaacagtgaccatgcagcagcaagattcggacttaccgatgcaggaaatatttacggaagacttacaaatccgacagaagatgtatttgaaagaagaattgcagcacttgaaggcggtgtggcagcactttcagtagcatccggagcagcagcagttacttacaccattgaaaaccttgcacagaacggcgatcatattgtagctgcaaagaatatttatggcggaacttacaatctgttagagcatacacttccttcttacggagtaaagacaaccttcgttgatccgtttgattttgaagaagtaaagaatgcaatccaggataatacaaaagcattatatattgaaacacttggaaatccgaactctgatgtggtagatatcgagaaatgggcagaacttgcacatgaacacaagattccgcttgttgtggataacacatttgcaactccatatctggtaagaccgattgaatatggtgcagatatcgtaatccattccgcaacg

SEQ ID NO: 829 - DNA, 687 bp, Faecalibacterium prausnitzii
  misc_feature: SEQ ID N?2279669
atgatctttcacattgcgatatgcagtccggacggggcgctgcgcagcaggctggagcaccagtgcatggagttctttgcccggcgggaggacgcctgcatcgtggagcagctgcaaggcccggatgcgcttttgcagcaggatgccgccgggctgcggtacgagctgtacctcatcgagcttgcggcggtagcccggcccgaagggcttgcggcggcgggcgggctgcgccgccggggccgccgcgccccactggcctttgtggcgcgcaccccggcccacgcatacagcgcctaccgggtggacgccatgcagtatctgctgcagccggtgcaccagacggaggtctctgccctgctcaagcgggcggtggagccggaatacggccccacccttaccgtgaccaccgcagacggcgtgcgggcgctggcctatgccgagcttgaatatctggagtgcacccaccatatcgtgcacttccacctgaccaccggggaggatgtggcttccctctcgctgcgggtacccttttccgccgtggcgcagccgctattggcagacggacgctttgtgcagccgcaccgctcctatgtggtcaatctggaagcagtacagctgctttcccccggcgaggtacggatgcgcagcggggcacgcattcccatcccccgcggacgggaaaccgcc

SEQ ID NO: 830 - DNA, 207 bp, Unknown
  BMI gene
  misc_feature: SEQ ID N?2282098
atggctaaaaaagcgatgataaacaaagaactaagacgcgaaaaacttgttgcagcaggtaaataccctgcagtaagacttcataacagatgcagcatttgcggcagacctcacggtttccacagagatttcggtctttgcagaatttgtttaagaaaaatggctcacgaaggtttacttccgggcgtaacaaaagcaagctggtag

SEQ ID NO: 831 - DNA, 570 bp, Unknown
  BMI gene
  misc_feature: SEQ ID N?2283397
aaagatttgcaggaagtaaatattaacagattaaattcctactatgaaaggccattgttatatgcagaatttttcttgagaaagcaagtctttttccctaaaaagggtaagtcaaagctaccatcactgctatttccgttagataaaatgtttgaagattatattgaagcaattttaaaatccgcaaacatatcttataattcgcaatatagtcgtcattatcttcttaaaaataatctttttcagactaagatggattttgttatttttaaagataataaagctatcatacttgatgcaaaatggaaagaattagattcaacctctgacaaatttgatgtagcacaagctgacttatatcagctgtttacgtattctgaattaataaaaaataaagaaacagaagttgaagaggttgaaataatgcttctttaccctgaatcaaataaatttaaagaagtaacaaaatgggaatattttaataatactccagtaagtattgtacctattaatgtttttgagaaagaaaataatcagttgctattaaaagaatttgactgtaactattaa

SEQ ID NO: 832 - DNA, 624 bp, Ruminococcus obeum
  misc_feature: SEQ ID N?2283545
ctctgcggcggcagtctcgcctacgtttccgccgcggcggaggtctcccccgccatgcgggcgcgctgcgaggcgctcgcggaggacggcaaaacgccgctgctcttcagcgaaaacggcagactcctcggcgtcatcgccgtggcggacgtcatcaagcccgacagcccgcaggccatgcgcgagctgcggaatatgggcatcgaggtcgtcatgctcacgggcgacaacgaacgcacggcgcgcgccatcggcgccgccgcgggcgtggaccgcgtgatcgccggcttactgcccgacggcaaggaagcggagatccgctgcctgcgcgagcgcggcaaggtcgctatggtcggcgacggcatcaacgacgctcccgcgctcacccgcgcggacgtggccatcgccatcggcgcgggcgcggacgtagcgctcgacgcggcggatgtggtgctgatgaagagccgtctgagcgacgtgcccgccgccatccgtctgagccgcgcgacgctgcgcaacatccaccagaacctcttctgggcgtttttctacaacacgctcggcatcccgctggccgcgggcgtgttcgtcccgctggggctgacgctcaaccccatgttcggc

SEQ ID NO: 833 - DNA, 258 bp, Bacteroides pectinophilus
  misc_feature: SEQ ID N?2283831
tgtgaaattatattagaagggctgttaaggctgagaaacaaagtaacatacagcgacattgcattcaatcttttgcctttggaatttacacttccggatttaaaaaaagtgtatgaagtaattctgggaaaagaattgtataagacaaattttaaggcaagtgtggaaagcaaagtagaagcgattgaccataagatagtgtcgatgaccagaggcgggaagatggcaatgggataccgctataaaactgaggaataa

SEQ ID NO: 834 - DNA, 504 bp, Coprococcus comes
  misc_feature: SEQ ID N?2284460
tcccgattttcaacagaactttcttttccgtgtcatctggaaaaagattctgcggctgccgctgcctgggaattatggacaaatctggatctggaaaatgcccttgtcctgcttctgaatgaaaatctgagcggttctgtgattacgggacatcagatccaccatggcagtaaaaatcacggcggttctgtggaacatatctgcctaaatccagaagggcctctgtgttactgtaaaagccgcggatgttttgatgcatactgttccgtgtcagcacttgagtcggtttcaaaaatgcctgtttcagactttcttgcaaatctgaagaagaacaaagatttttctctcatccgtatctgggacgaatatctttccatgcttgcacttgctattcggaatctgaatctgattattgacggtccggtcattatcggcggatatttatcctcctattttaccccaaatgtacagtcctatctgctgagcaagataaatgcctctact

SEQ ID NO: 835 - DNA, 636 bp, Coprococcus eutactus
  misc_feature: SEQ ID N?2285666
ttgttgtgtgtgcctgttaaagaaataagcgatgcacagacaatgaaagaaaaggaggaagatatgaaacgaaaggaaagaaaacgaggagcaaggaggatatttgccggagcaatggcggctcttatggtgctgtcggcggtggatgtgaatgaatggggtgtgcttacggcgaaggctgaggagactgcagcgggaaagattccccaatatttgataataggctcaacaaggattattgataatggggaaattcaggatgatggagtttccagtaatgaggatacgatatatcagggaacaaattggtactatgacagtacgaagaatcaatttgtattggacagtgcatctatttctggtaacattttgagtcagaacggcgatattgcaatcatcttatccggaacaaatactatgagatcagatatgatgattcagagtattttaacagaaagcggtattgcacctacgttagagataaatggtaacagtcataatggaagtctgagttgtggaaaaatcagtatagctgactctggctcaaataataataatttaaatattataggagcaacggtggagacttcccaaattgattgtagtggtagtttaacgattgaaaatagccatgtt

SEQ ID NO: 836 - DNA, 750 bp, Coprococcus eutactus
  misc_feature: SEQ ID N?2285667
attagtagtaataaaattaatatagtagacagttatgttgaaacgaaagcaacaacagaactaagagaaggtgaggtaattaaatcaaatcaaccaattaatatatcaggaagccagattgtggttagtcgtgctttagcaagccaagaacctgtactaagcgagcgtgatttcagtaactctgttatcacaaagcaatggaaagatgctgataccgatgatgatgtaacaaaaacatatgtatatggcacagccacattaaaagaaaatctgacgattgcaagtggagaaagcattgaatttaagagtggtgcaagcattagcaatccggagaaactcacgttggaagatggtgcgagtctcctggtagatggagttgaacacgaacataatacaaacggtgatgttgtatacacatggaaggatgacaatgaacatgtaaaaggcgtggcgtgcaaagattgtccgattggatatgtgaccgaagaaacggaaacacatagtatcagtgagaatggattctgtgcatgtaatcaggtatatcagccagcaaatcttaccacagacaagtatgacatagatggggacgacagcgtggatgaggtatacgaaatcagtaatgccggtcagctttactggtttgccggacttgtaaatggtacactttcgggcgtagagaagaatatatcagcgaatgcagttctgacagcggatattgttgtgaatgaaaatattttaaagtcggatgga

SEQ ID NO: 837 - DNA, 759 bp, Unknown
  BMI gene
  misc_feature: SEQ ID N?2286016
gaaagattccgctatatcatgatcgacgagtatcaggatacaaacaccgtacagtttcgtttcgtcagcctgttagcggcaaagtacaagaatctctgtgttgtgggtgatgatgatcagtccatttacaaattccgcggggcaaatattgaaaatatcctgaattttgaaaaagtatttccagatacaaaggtgattaaactggaacagaactaccgttcgaccggaaatatcttaaaagcagcaaatcaggttatccggaataatacaaccagaaaagataaggcattgtggacggataagggggacggagagaagattatcctgaagcagtatgacaatgcctatgaggaagccgaaggaattgcctcggacattgcaaaaaatatcgagatgggaaaatacacttacagtcagtgtgcctgtctgtaccgtaccaatgcgcagtccagggcattggaagaaaaactgatttcatggaacatcccatataaactctttggcggtgtaaatttctaccagagaaaagaagtaaaagatattctggcgtatttaaaaacagtcgataatgcgagagatgatgtagcggtaaaaagaattatcaatattcctaaaagaggaatcggacagaccacactggataaagtccaggcatttgccaatgcaaataatatcagcttttttgatgcattaaaacgtgcggaagaaatagatattgcggcaagaactgccaataaaatccgtgattttgtaaattct

SEQ ID NO: 838 - DNA, 771 bp, Unknown
  BMI gene
  misc_feature: SEQ ID N?2286744
gttgtgctggcggcggggattacgatatgcggttatgaagcacagccggtaaaggcgaaggagaagagtattccggagtttcagctggtaaaagaggaaacagagagtaccacttccctgtttgataacatggaaacggttacactgccggaggtggagaagcagacaaaagaggcagtggtactgaccagggataccagtgagagtaaccgtacctataaagatggtacttattatggaagcggaaccggatttggcggaaagctgacggtggaagtcgtgattcaggacggaaagatcgtatctgttacccttgtggaaaatgaaggcgatgatcatccgtatattgataatgcttccgccctgctgcagagcattgtagcgacacagtccacaaatgtcgatgcggtatccggtgctacctacagttcggcaggactaatcgaagcggtaagaaatgcacttgcacaggcggcggtatcaggaatgggcagtgcagtaacggcggatcagacagtgcagaaggaaacacaggcatcatccggcacgaccagtctgaccggagcagaggagcagggaaagacttatcggaatggaacttataccggcatggcagtctgggttccggacggagaggaagaattcgatgcctataccctcacattaaatgttacgattgcagatgacaaaatagtgggaatttcggatatcaaaggaagcggcgaccgttacatcagtgccaatgaccgttatcttgcgaaggcatcggcg

SEQ ID NO: 839 - DNA, 933 bp, Clostridium phytofermentans
  misc_feature: SEQ ID N?2287009
atgaaagataataatgatgaaattgcaaaactatacaacaaattgatggtacaaattaaaagttatcatccgtcttccgatttcagaatggtaaggaaggcatatgaagtagcaaaagaagcacataagaaccagttccgcaagtcgggagaaccatttttcatacatccgctgaatgttgcactgattctggcggagttgaagctggacaaagaaacaatcatagcggctattctgcatgatgtggtggaagatacggagattacgacagaatatatcgaacaggagtttggcacagaagttgcgtttctggtagacggagtgacaaaacttgctaatcttcagatgacggttgcacatgaatgcctctccaaagaagcattgaagcaggaaagttttcgtaagctgattatggcaatgtccgaggatatccgtgttatcatcataaagcttgcggaccggctccataatatgcggacgatggagttccagaagccggagcggcaggtcgcgatatcgaaagaaaccatggacatttactgcccgattgccaaaagactaggaatatccattgtgcagacggaattacaggatctgtccatgcagtatatttatccggaagcatatcggaatatacgcatgaagatagaggaaaccgagcctgataggcgtatctttgtcaaccgtatgtctgcggagatttacgcgggactgaccgaagctgacataggagcaaaggtggaatatgccctgaagcattatttcagtatttaccgcaagatgattaacaagggtaagacactgaatgagatttatgacagctacgcgctgaaagtcattgtagattctgtcagggactgctatgttgcactgggggtattgcatgacctgtacaaaccggtgccgggaagatttaaagattttatcgcactc

SEQ ID NO: 840 - DNA, 399 bp, Unknown
  BMI gene
  misc_feature: SEQ ID N?2287268
ggaaaaagaggacatgaactgctcaaaggaaaccagaaaattcttgtattgggagatgcaggaattacactggaaatcatgcaggcgattgccaaacaagaatatggatttgccaaaaatgatattgaatttcaggtggattataagaaaattgtaggagtatcaaagagagtccatagcagcaaccggtatgcagccatgatactgggaaaatgtccgcataaagtggcaaatctcggaagctggtccagtattattgcagaatttgagcaggcaggttatcagggcgaaaccgttgcagcgagatcagaatccggtgaactcaagattacaaaaggatctttccgcaatgcactggaagaaatatatcagaagttaagtaatcaaagcgaaaattaa

SEQ ID NO: 841 - DNA, 1611 bp, Unknown
  BMI gene
  misc_feature: SEQ ID N?2287915
atgattgaaaaattaaagcataaatatgccctgtcagaaaaaggtgcaaaggatatggtgcgggcatttgtggcggtgacactggcaaaccttgccctgatggtgccggtaggtctgctgtatgtgctggcatcctgccttctggatggaagtctgccaaaagaaaaactgccgttttttattatcggtatcattgcggcattgctcctgattattgtaacgacctatttccagtacaattccacctttatggcaacttatgtggaaagcggggtaagaagacgtacacttgcagaaaaattaaggaaattaccactgtccttttttggaaagaaggatttatccgacctgaccaatactattatgtccgactgtgcattgctcgaaacagccagttcccactggattccggaacttgtcggtgcatttttatccacaacaattattgtcatcagcctgtttgcatttgactggagaatggcacttgccgccgtatgggtaatgccggttgcatttctggtggtattttattccagaagtgtaatgaataaaatacatgaaaaatctctcagctacaaattaaactgtccggatggcatacaggaaggactggaaaccataagggatttgcgttccaacaatatgacggacgcatacagaaaaggattaaataaaaaaatcaaagatgtggaaagatatgcgctggtttctgaatttaccaatgcggcatttgtctgctcggcacagatgatactgaaactgggaatcggaaccgtggcagttaccggcagtatgcttctggttaaaggagaaatcagtgtgctgaccttctttatgtttttgctggttgttaccagaatgtatgagccgctgcagatttccctgcagaatctgtcagctatcataagccttgacccaagctgcagacgtatggatgaaattctctcccacgaggagcagagcggacgtgaaacactggataacaaaggatatgatatctgttttgaccacgttgcattttcctacaaggcaggagagcaggtgcttcgtgatgtcagctttacggcaaaacagggagaagtgacggcactcatcggtccgtccggcggtggaaaaacaaccgtatcaagactggctgcaaggttctgggacaatgaaaagggaaaaattaccgttggcggaatgaatgtgtcggaaattgacccggaaaaactgttatccctttattccatcgtatttcaggatgtcacattatttaacaatacggttctggaaaatatcagaatcggaagaaaagatgcgacagatgaggaagtaaaagctgctgcaaaacttgcacactgtgaggaatttgtggagaaactgccggataagtggaataccatgattggagaaaacggttcggagctgtccggcggagaaagacagagaatatccatcgccagggcatttttgaaggatgcgccgattattctgatggacgaggcgacagcttctctggacgtggataatgaatccgttattcaggaatctatctcaaaacttatccgcaacaaaacggtgttaatcatcgcccacagaatgagaacggtggatggtgcggataaaata

SEQ ID NO: 842 - DNA, 564 bp, Unknown
  BMI gene
  misc_feature: SEQ ID N?2288051
atgattctgggtgaaaacggcgaaaaaatgtcaaagagccgtggaaacgttgtaaatccggatgatattgtcaatgaatacggtgcagataccctccgtacctacgaaatgttcatcggagctttcgatttaagtgcatcctggtcagaagatggtgttaagggatgccgccgtttcctggacagagtatggaaactgcaggacattctggtggatggcgacagctacagtgcagatatggagacaaagatgcaccagaccatcaagaaagtgtcaaatgactttgaaaacctgaaatttaacacagcaatcgctgcaatgatggcattgttaaacgacttctacaagaaaggtcagataaacaaggcagaatttgctaccctgattaccctgttaaatccggttgcacctcacattacagaagaattatggcagaaacttggccataccgattatctgtatcagcagacatggccggagtatgacgaggcaaagaccgtggaaagcaccgtggaaatcgctgttcaggtcaatggaaaggtaaaggcaaaattaaatgtttcc

SEQ ID NO: 843 - DNA, 429 bp, Unknown
  BMI gene
  misc_feature: SEQ ID N?2288429
aattacagtctgaaaggtctgtcagcggatgaaaagaatggttatatgacaggtattgcagaaaatatgacggtggataatttgaaagcatccatttttgttaccaatggggatgtaaaggttcttgacagcagtggaaatgggaaaacaggtgttatcgggacgggtgatatcatccagattataaccggtaacggcactgtctataaacagtttacggcactgcagtatggtgatgtaaatggagatggctgtattaatgtaaaagatgcatttctgattcgtaaggatatactcggagaagcaaaattatccggtatatatcggattgcagccgatgtaagccggaatggcgatggaattaccataaaggatgcctatattataaagcgtcatattctcggcgagaataagatacagcagaattag

SEQ ID NO: 844 - DNA, 1368 bp, Unknown
  BMI gene
  misc_feature: SEQ ID N?2288670
atgattattcatggtacagattataatggcgtgtgtgcctgtggacatacacatataatgacaacggagctttctgtgatagaaagcggttgtttgagaaatataaaaaaatatatggaagaaagcggtatttcaggtttttcggcagcggtttatgatgagaatacctatcaggcgaccatggacaggcatccggatgtggattgcgaaattgtattaaacccggaaaatctgcatgcaaatgaacatggaatagaactgctgatggaaaaacttccggaaaatacagatgttctgattgccattggatccggtacggttcatgatttgacgagatattgtgctttggtaaaaaatgcagagtttatttcctgccctactgccgccagtgtggatggattttgttcgtctgttgcagcccttactttgcacggctgtaaaaagacagtgcctgccattgcaccgaaattagttgtagcagatattgatattatcaaagaagcaccgctctatctggcaaagtccggatttggtgacatggttggaaaatatattgcactggctgactggaaaatagcgaatattcttaccggcgaatactattgttccaggattgtacagatgaccagacaggcagtagaggaagtggtgtgttctgttacaaagatattaaaccgtgatgaggaggcatttatcagactgacttatggactgattttatccgggcttgccatgcagatgacaggaacttccagaccggcttcgggagctgaacatcacatttcacatatgatagaaatggcaccagagggacctggtatatcttcggaagccctgcatggagaaaaagtcggtgttggtacattattggctgcacaggaataccagagtattttgtgtgcaaagaatatagcgttcagggattatataccggaaaaacagcagaaaataaaagaactttttgggaatgtcatagcagaagaaatgataaaagaaaatgaaaaagatactgcagtttctatcacagggcaggcattgcaggaacactggtccgaaatatgtgatgtgctaaaagagataaaagatgcggatgaattaaagaaattatatgaaaaagcagggattaaaagttcgctttctgatattggtattgatgaaggaaaaaaagatttgctgcttgcatattcctatctggtaagaaaccgccttactcttatgcggatgagaaaatgcctggttttgaagaaaggaattatttttgatatggacggcactctctgggattcttctgaaattgtggcaaaatcatggacggatgcgataaagtcctatgacaatacaggtaaagtaataacaccggaagatatg

SEQ ID NO: 845 - DNA, 621 bp, Ruminococcus gnavus
  misc_feature: SEQ ID N?2289046
atggaagatgtccttgacgtttatgaacttccgtatgacgaaaaatgtcccgtcgtatgtatggatgaaaaaccgtaccagcttttgggagaagccagagaatccctgacaatgataccgggaagcgatcggaaaacagattccgaatatgtccgtaatggaacagtcagcatatttgctttcgtggaaccgcttggagggacacatcatgtcagtgtacgggaacaccgtacggccattgattgggcagaggaaatccggtatctggtggacatcatgtacccggatgccgagacgatcatccttgtgatggataatctcaacacacataaaccagcatccctgtataaacgatatccgccggaagaagcaagacgtatcataaaaaagctggagatacattataccccaaaacatggaagctggctgaatatcgccgaaatagagcttaatataatgagcagacaatgtctcaaccgccgcattgctgaaataggattattacgcagtgaactatccgcatgggaaacggagcggaatacattggcatcaaaagtcaactggcattttagaaccggtgatgccagaacaaagctgagtggaagcacgcatcatcgaaat

SEQ ID NO: 846 - DNA, 678 bp, Roseburia inulinivorans
  misc_feature: SEQ ID N?2289205
tataaagtaaatacagataagagtacaaacgatctgatgcggaagatgaaaattacattgtcccagatagaggaagaacctccattttgggatttagaacagataaaacaggtggggatttataaggtggataatagagatataactgggacatcactggcagaagcagcagcgcgggagagttttgtggtatctttttataatatattttatttggactgcgttctgaaaattatgaataatgatattgaaaaaaatatatattcgatacatacaaaaaaaggtctttctcaatacctgtttgaacggaaattgatagatgcggacagctttgtcaaaatgtattttgccggaacgaggattaattttacaaaattagatccagaatatggattgaatcagcttcaaaaagcagaagtaaaagaatgcataaataattttcaacgatttgcacaggcagaaagctgggataagatatatacggatccaactcttgtatataaggagtatcagccggcttcagataagaataactggtttcgcaacacagaatataatgagaagcacatagataaatttcgctgtattaatccaaaacgctgtttcggatatcgggaaggagagatattttatgcactgcggattgagagggatcataaaatcagtgattatggatga

SEQ ID NO: 847 - DNA, 729 bp, Unknown
  BMI gene
  misc_feature: SEQ ID N?2289743
aaagaaaatgatgttttgcaggcattgatgaatggtgccgaaggcatcggacttttccggaccgaattcttatatctggagaagatgaattatccgacggagcaggaacagttccaggtctacagatatgtggcagaaatgatggcggggcgaaaggttgtgatccggacactggatatcggggcggacaagcaggcaggttatttcgggttggaaaaagaggaaaatccagcactggggtatcgggcgatccgcatttgcctggaacgcagagatatgtttaaaacgcagctgagggcgattttaagggcagcagcatatggaaatatatccattatgcttccgatgattgttttggtggaggaaatcagaagttccagggagattctgaatcaggcagaaaaggaactgacggaagagggaatcgcctttggaaaagtggaactgggaatcactgttgaaacgccggcagcagccatgctgagtgaggagatggcaaaggaagtagactttttctgtatcggaacaaacgatctgacacagtataccctggcggctgacaggcagaatcataagctggacacactttatcagagtacacatccggcagtgttgaaaatgataaagatgatcattgagaatgggcaccgggcaggaattcgcgtgggtatctgcggggaactgggagcagataccgcgatgacttcgcagttaattgcaatgggaatc

SEQ ID NO: 848 - DNA, 360 bp, Dorea formicigenerans
  misc_feature: SEQ ID N?2289978
cttctggacggggatgacgaaaccggggataccggggcacaggaaacgcagagggatcagacaaccctgcagaccgaaggagaaagtgtggaagaagctgctgcgcagaatactacacagcccccgacagaaacggaagcccagacacaggcagagccgcagacgacagaagcggagacagaaacagccggtgtactgcctgcaaatacccgctattatgaagtgcagaaaggggataccctgtataaaatctgccggaaattatatggaagtacggataatgtcaaagtaatcatggaattaaacaatttaagcagtgcggacaatatcacttatggaaaaacattgataattccttaa

SEQ ID NO: 849 - DNA, 513 bp, Bacteroides pectinophilus
  misc_feature: SEQ ID N?2291479
cgtgacgtggcacaccgccgtgttgtagaggaaggaagagagattcctgtagatgttaaggatgcggcaatctttcatgcaggaccaatcatccgtccgcttggagatgaaaaatacgaaatggtatctgtaggtccgacgacttccatgagaatggaaaaatttgagtatgaatttgtagaggccaccggggtcagagtcattgtcggtaagggtggtatgaaggaaaatacgcagagagcctgcaaggatttcggcgcaatccattgcgtatttcctgcaggaaatgctgttgtggcagctgctgaggtagaagagattgtggaagcacaatggaaggatttgggaatgccggggacactgtggcactgtcacgtaaaagaattcggtcctttgattgtatccattgattcttatggaaaaaactactttgaagagaagaaagtggaatacaacaagaagaaagatgaacagattgagatcatcagtaagcaggttggattcatcaaataa

SEQ ID NO: 850 - DNA, 354 bp, Unknown
  BMI gene
  misc_feature: SEQ ID N?2295529
atgagcagtaatattatccttctggcagcaggaaacggcacaagatttggcggtgataagatgctgtttctgctgcatgacagaccaatgtacagatacatgacagataatgcaattaaaataaaacaaaattgtaataatataaatcaggttattctggtgtcccgttatgaggaaataaagcaggcaatagccggatccggtatcgattatgtggataaccctcatccggaatatggaatttcccattccataagactgggactggaacacgcaggaaaggcagattacaatatatttgcagtttgtgatcagcccgcactgacctatgaaacctttgccggttttattaca

SEQ ID NO: 851 - DNA, 303 bp, Unknown
  BMI gene
  misc_feature: SEQ ID N?2295537
ttgattaaaggtgttgtttcaggattcttaaatagaaagtttcaagttggtggttttaaagcatatgttacaagtgatgtattgataggagctggattatcttcatcagctgcttttgaaacattaattggcactattttatctggattgtataacaatatgagcgtatcagcaattgatattgctattataggtcagtatgcagaaaatatttattttggaaagccttgtggacttgtggaccagatggcatgctctgtgggaaatcttgtatatattgactttgaaaacacaagcaagccg

SEQ ID NO: 852 - DNA, 522 bp, Unknown
  BMI gene
  misc_feature: SEQ ID N?2295746
atgaattatgcaattatcatatatgtacttggatacatattcaatttctcggcaggatttatgctgctgccgggtatcgtggcgattatttaccgtgagcaggaaggctggtggtttttattatctgccctgattatcggcatcataggacttctcttaacgcgtaaaaaaccggaaaacaagaacttttatgcaagggaaggaatggtcgtggtagcactgggctgggttggcatcagtatattaggtgctgttccatatgttgcaacgggaagcattccaaatgtagtaaacgcattgttcgaatctgtgtcagggttttcgacaacaggagcaagtattctggcggatgtggaatcactgcctcattgtgtcctgttctggcgatgttttaccaactggattggcggcatggggattctggtatttatcatggcggtattgccttatctcggagcaaataatatgtatctgaggcgtgcggaaagtaccggacctgcggtgggcaagcttgttccaaag

SEQ ID NO: 853 - DNA, 561 bp, Faecalibacterium prausnitzii
  misc_feature: SEQ ID N?2295832
atggcagtaaaagcaattcagttaattcagatcggaacggcaatgggttccgaagaaaaggcaagagaaacgatccgcctgatgaaagaagccggatatgacggaatcgagctgaatggattcatgataaaaaagatgccgccgatcgttcgtgttctgacaacccttgcggggatgccgattggaaagacagcgaaattagactggaagaagttgattgcggacaccggacttaaggtggtcagtatccacgaggatcttggaagcattcttagaaatccgcaggaaattatagaagaagcaaaaacattttccacaaagtatattgtcattacgggaatgcatcggtttgattattccaatatggcagcggtactggaattggcacagaagctaaataaggcaggaaaaattctgaaagaaggaggcatttccttgttatatcacaatcataactgtgaattccgcaaagtgggagctggaaaatgtgcctacgatgtgctgattgaaaagacaaatccggaatatgtcaccctcgcattcgattcttactgggcgaca

SEQ ID NO: 854 - DNA, 192 bp, Unknown
  BMI gene
  misc_feature: SEQ ID N?2297335
atggctggaggaattgcgatggaaaagaaactggaatttattcatgtaacaaaaaagtatggggagaagcaggcgctaagtgattttacggtagtcctggaaccgggaatctatggtctgttaggaccaaacggagcaggaaaatctacactgatgaatctgctcacggataatatcaggcggacttcgggt

SEQ ID NO: 855 - DNA, 369 bp, Unknown
  BMI gene
  misc_feature: SEQ ID N?2298724
ttggaatttaaacacagaccggtattactggaagaaacaatcgaaagtctgaaaatcagaccagatggcatttatgtggacggaactctcggaggagccggacatgcaagccaggtgtgtaagaggctttcggaaaaaggcagatttgtagggattgatcaggatgattgtgcattacaggctgccggggaacggttaaaagagtttggaaagaacgtcaggattgattgtgtaaagagcaattactgtcagatgaagagtgttcttgaaaatctggggattgacaaagtggacggcattctgcttgatatcggggtttcctcgtatcagctggataacgcggagcggggatttacctacagggaagat

SEQ ID NO: 856 - DNA, 663 bp, Unknown
  BMI gene
  misc_feature: SEQ ID N?2299043
gtattaaatggcaaatatgaacaacttgggcaggtgacagatataagaaatatttataaacgtggcaagattagtatcagggcagaatgggacaacgacaagaaaagctctatgctggaatatgatgatgtgaatgaaacatggagaatagatattgcaggtaaaatggatattatttatctgagtgcggaaagaattggcgtgcaaaatgaatatcatattaatacacaggaattatatcgtattggtgtgcgaggagagtatgcatttgatttcctgagcaaaaataaacatgaaaacctgagggaagagaaatttgctattcgtgaagctggtttaaatcttggcaatcaggtagactactggttgaattatattgcaggatatacggttcaggcagaagcaatagatggaacaacgattgtgaaggttgcatacaggggaaaagacagtgtaaaggatttaaggccttgtcatgtaggaacaggagtaagttatctggctggagtaattatagcagcattatcctgcaccagggatagtctgtttattgtggaaaatcctgaaatacatcttcatccgggggctcagtccagatttgtagaattttttgcatttctggcatcaaaaggtttgcaggtaattatggaaacgcatagtgat

SEQ ID NO: 857 - DNA, 1035 bp, Coprococcus comes
  misc_feature: SEQ ID N?2299726
atggcaatgagtatggtgtttgcaaatgtgcaaagtgatataacagcagcggaacttacagctacggatgcaacagaaagagaaagcattacaatagaaacggaaattgggacagacgaaaccgaaatggtaaatgaggaaatgatgtttgaaacggatgacgtggcggtatcaatacaaagtgcaagagcagcggcaaaaacaagcacagcttctgtattaacagcggctcagtggaataatacggcaaagtatgcatgtgaattgaacagaaatgggaaaaaggtaagcggacagtttggaacgcagcttctgcaaaaagataagattatacctgggctgagttatacacggtttgaaagtggtggatgttccgatatggtaccgcaggcagtatgttatgtaaaaggatatattctgatatctgcgtattgcagtgcaagcagtggaaatcattcatccgtattgtatgtacttcgatcagcagattgccagtatctgtgtacattacagctggatattacggcacatgtaggtggtatggcatatgatccggacagtgaatatctgtgggtatgcgacagcagccaaaaaaggctggtagcatataatatggcatatctggatagattttatatacacgatgcatgtttggtaagcagtcagatgcgaacaatatgtagttatgcagaacatgcagttgatcttgatccaagtttctgtacttatgcagatgggatgatatgggtaggaaaatttgatgaggatcataatagcatagtgcatggttatctggtaacaaaggattacctgcgcagaggtgcatggatgaccggaccgaaaaatggacagggaatggcaatataccgctcgcagggaattacatactgtacgtttgcaacatcgtatggcaggagaaatgactcgaagatatattcctatacgatagatgattatacaatcaaagtaggttcgaaagaaatgggactgcatctgttaaaaactattacaatgccatctatgatggaggggata

SEQ ID NO: 858 - DNA, 1269 bp, Unknown
  BMI gene
  misc_feature: SEQ ID N?2345433
atgacagagaaaaatatgcattatggtattcaagcgaaatggtatggttttcagaaaattgggatttataatggaaatacatttgaattaaataatctggatgtactgatactgaaagaacagaaatgttattcctatcatattaacactattgccgctcattccgaatggatagaaaacggggtagaaactgattcgggagaaaaacgtaaggagtttcattctgttggttactttgaaggaaagcaaagaattatagatacaaagctttttaataaggatactggtatttatgaaggagaacctcatgatgcattggtgtggccagatacagatacagacgaaaaatggaaaaaagaacttgtttttcagatggaagaggttcaggtacaggtaagaatccgttttatagccagaggtcctaaagtggcgttttgtggacatagttttactggattgtgggacagctcttattattatttcagggaactggcaaaaatgggtggctggaatgcaagagtagcttacagctattggggaggaactggcattgctcattacgcaggtcttgtggaaggatgtgaagaacgggctgagcagtgtgagaaactgattaacagcaatgaatattatgattattttgttgtagctggaaacagtaatgaggccgtggaaacttatagcggagagattggtgcgaaagattataaacagagaccgaggatgttgcaaggagcaaaaatattacatgataaaatacatggtaaggcagggaaaatgattctatgggcaccacatgcatatcagtatggatatcttcaaagcagggctcccaagccatggatgccgggtatgcctggagatgtatatgataaaaatggagatgattatatactcaccatgaccacagaaaaaatggcgagagtaaacgcagagtggtatttgaaaatgactgaaacgctgggtaaggatacagaagtgcttccggtatgtttaggatattgggaactcagaaaacaatatggcttatatgtgaatccttatttgtctccggaagaaggtggagattacggacaccagaacaatataggaaattatattgcggcttgtttattgtatgcaaaggtgtttgaagaaagtccggaaggattggggattccagtatctcatacctttggaatgcctggaggaaaggtgacacaagaacaggcagaaataattcagcaagttagctggaatgtatataataattggaaaaaaacagaatag

SEQ ID NO: 859 - DNA, 420 bp, Unknown
  BMI gene
  misc_feature: SEQ ID N?2345435
atgagattgacaacgatttgttatatagaaaaggatgaaagctatctgatgcttcacagaaccaaaaagcaaaacgaccagagtcacgataaatggcttggggttggaggaaaatttgagaaagatgaaagcccggatgaatgtatgctgcgtgaggtaaaagaggaaacaggactgacactggaatctttccggctccgcggggtcatgacctttgtatccgatgtctgggagacagaatatatgtttatctatacggcggatgctttttccggaatattaaaggaatgtgacgaaggagacttgcagtgggtaaagaaagcggatatcatgaatctgaagctctgggagggagataagattttcctgaaaaaactgatggacggggaggacttttttacgataaaaatggtgtatcag

SEQ ID NO: 860 - DNA, 375 bp, Unknown
  BMI gene
  misc_feature: SEQ ID N?2345771
gaacatgcaaaaatgtggtttaaggaactggcaggaatcggaaatacaaaagaaaatctggatgcggcagcaaatggcgagaactatgagtggacagatatgtacgaagattttgcaaagactgcagaagaagaaggatttccagagcttgccgcaaagtttcgtgcagtaggtgagatagagaaacagcatgaggaaagataccgtaagctgcttaaaaatatcgaaactgcacaggtatttgaaaaatcagaagtaaaagtatgggaatgcagaaactgcggacatattgtagtgggaacaaaagctccggaagtatgtccggtatgcaatcatccgcagagttactttgaagtacatgaggagaattattaa

SEQ ID NO: 861 - DNA, 453 bp, Unknown
  BMI gene
  misc_feature: SEQ ID N?2345904
agaaatgctacagaggaacaggtaattgcggctgcaaaagctgcacaatgccacgaatttatttcaaaattgccagaaggttatcatacggttgttggaacaaaaggtgttcatttatccggaggagaacgacaaagaattgcgattgccagagcaattataaaagattctccgattattgtgctggatgaggcgaccgcgttcagtgatccggagaatgaatatttaattcagaaggcttttgagaaacttatgcagaataaaacagtaataattattgcccatagactttctacgattcgtaacgcggataaaattattgttatggaaaaagggcaaatagtagagtctggaaaacatgatgatctggttgctgcaggaggccgttatttccaaatgtggaatcattatacagaggcaatcaactggaaactcaatggaaaggcggtgtaa

SEQ ID NO: 862 - DNA, 285 bp, Catenibacterium mitsuokai
  misc_feature: SEQ ID N?2345927
cctttttatgatgaggatgaggaggcttgccgcagtatgcatcgaaaagtatatcatacctttccaatcagcagggtttatcaggcacatataccgacaagtccttccggctactggctgtttggatttgcatcgaaaaagtaccatccgttaaaggatttccaggcagagaactggaaaaaaagaaagatacatacagaatattatacgacaaatctgcatatgggagcttttatgctgccaaaatacgtggaagaattgttagaacaggaggaagaaagatga

SEQ ID NO: 863 - DNA, 1347 bp, Unknown
  BMI gene
  misc_feature: SEQ ID N?2346527
gtcattgataaattcggaattggaaaaataagtatatgtattattgtatttacaattattgtaaaacttgttatgctgccgattaatatcaagcagcagaaaacgatgaagctaaatagcgtgattatgccagaaattcaggcaattcagaaaaaatacgcaaataaaaaagataatgattccatgatgaaacagcaggcagaattaaatgctgtttatcagaaatatggaacttcgccgacaggtggttgtctgcctatgctgatacagtttccgatcctgcttgcattgtatgcggttatggcatgtctgccaaactacatcaatgagatccaggatatgtataataacggtgttgtatcttatgtaataggcacggatgagagtggaaaattagattatcataccatccatgaattaaaagatcttgctggtctgaatgatgtgctgttagatgaaaacggagatgaaaatctggataagcttgtaacagcatattttggtcagaagggcaattatgaggatgaggaaatcaaggatgctgtttataacagttttacttcagcatacagcaatgtatttggaaagcaggatgcatgggcgatcgtggaagcatcatttgatgaagcaattgaaaatgcacaggatttaaaagctatttctgaagcagactggaaaaaggttgaggataaagacctggcagaatatgctgattatacagatgaagattgggatgcactgataagcagttacgaaaccattctggataagctggatgataatcataaagacattcaggtttcctattcatttttcacgattgatttgagtaagtcacctgcaaatggagtaaagattgcgattattattccgattttatctgcacttgcacagcttttaaacatgaagatatccatgtcaagccagcagaatacaggaaatggtactgcagattccatgatgtcctccatgaaggtaatgagctattccatgtgtgtcgtatcagcaatcttctgttatacattcccggcaggtcttggtttgtactgggtaatcagttcggctgtgcaggtagtgatccagctgatattaaataagaaatttgcaaatatggataccgatcagattataaagcagagcatcgaaaaagcgaataggaagagagcgaagaagggacttccgccaaatacgatttcaacagctgctgcaacaaacacaagaaattataagccgcagacaacggaaaccagtcagaatacgacaggtacaggaagtgcgggcggtgcaaagaaaggctcaatttctgaaaaagcaaatctgaataaaaaatatatggataagaaatag

SEQ ID NO: 864 - DNA, 582 bp, Eubacterium ventriosum
  misc_feature: SEQ ID N?2347115
atgggtagttcacgaattgttttatttttaaaatatatctactatttaaaatatcaagaaggagcagaaaaaagcatgaaaaagaagaaaaatgagagggatggttttaagagcagaacaggttttgttctggcatgtataggttcggcggttggtatgggaaatatctggcgttttccctatatggtatcagactggggaggaatgacttttctgcttccctatgtcctgtttgtcattttgataggtgcgtccggtgtgattgaagaaatggcactgggacgtgcggcaaaaggcggtccgattaaggctttcggaacctgtacggaaatacacacaggcagaagaaaaacaggagaaatcatcggaaccattccggtttttggttcacttgcactggccattggatataccgtagtagtcggatggatatttaagtatacatttcttgcactgacaggaaaagttgccggtatgggacaggacatggacgtaattggcggtatgttcggtagtacggcatctgcatttggaaataacttctggcttgtgattgccatgattgttacggctgggattttt

SEQ ID NO: 865 - DNA, 759 bp, Unknown
  BMI gene
  misc_feature: SEQ ID N?2347973
atgggatggataaaaaaggttattagtgtgtgggggtttatattgctcggttgtcaggtggtaagtgcgaatgaagtgcagagttatccttatgccttgttctggaatgattatcagatgactcctgggatatcaaaaggggcagtttctattgatgatgtgctggaatggagagatatatgccgggaagcgctgggggatgaaatggaaaaaaatgcagatgcggtatatgaatcatatgacagttattttgctgataaatcgtgtgaatttttaaatgtgacacaatgtgctgactggtatgaagtgtatgatgaagaagtacagcagagtctgcagcaggtaaggctggagaattattacattgtattcaatgatgaggggcggtatgtatatcagttaagccttggggcaggggaatacagcagttcggatagcggtccgtttttaagagcctgtgtcagtggaaatgtgatatcgctgagattctgtaccgctgaggaattacaggactttttgcaggaagaaagagagcggtatacagaaaaaagaaatctcagtatgagcaatgtggagaaagcggatgactgccagtttataagtggtatatgggagttgagggatatccttggaatagaggatatttactatgacatctccggacaactgtgtattgcaggcatttttgaaccggaagaatttcaggaaaaactgaaccagcagggatatcagccccgggggaattattatatgggggaa

SEQ ID NO: 866 - DNA, 657 bp, Unknown
  BMI gene
  misc_feature: SEQ ID N?2348195
agaactctggagcaggaaggtctgtatatctgtctgataaaaaatcccagggccgctgcgggttatgcggtgcatggaatggcggatgcggaatttatccgtgggaaagtacctatgacgaaagcggaagtaagggaagtaagtatctgcaaaatgagactgcggacagactctgtgctgtatgatatcggcggcggaacaggttctgtgtccatagaggcagcaggtctgtcagaaaatatcacagtctataccatagaacagaaagaggaagcatttgcactgatagaggagaacaaaaagaaatccgggcttgaaaatattaaggtaatccggggagcagcgccggaggcaatgcaagacctgcccgtgcctacccatgcatttatcggaggaagcggaggaaaactcaaagaaatcctgaatgtgctttatcagaaaaatccaaagatgcgggttgtaatcaatgcaatcagtctggaaacaatcagtgagttgaacatgatactggaagaatatccggtacagaatgaagaaatcattcagattcaggtaaaccgtacaaagaaagcgggaaaatatcatcttatgcaggcggaaaatccggtgtggatttgttcctttgcgtttggagaggagcgggaaaatgaagattag

SEQ ID NO: 867 - DNA, 918 bp, Unknown
  BMI gene
  misc_feature: SEQ ID N?2348333
aatgtaaatattgtgggagtgtcagaggattttgaaacgacagttccgattaaagtatataataataaaggtgtggaactgattcaggcagataatcatgttacaacggatattgcacaggtaaatgcaagcagtacggtatattatacgaagtccataccggtttcctatacggaaattacgagtccggcggatactgcagttgtgtcggatatcagactgagtaaaaacaatatttccattatgggaaagaaggaatatctggacagaatagaagaaattgtgcttccagtgtcagatatcatcattgatggaacacaggaagaaatcaccagaacctttgatatagaggctctgctgccggaaaatgtgtacctgaatgatacggtaaaaaccattacccttacggtaggattggaaggaatagcagaaaagacaatctatgtggatgttaaggatattggcataaagaacataccggatggcatggacgcatccatcagctcgacaggaagtgtttcgatccgggtggagggtaagaaaacactgattgatgaactgaaaaactcggatattgtggcatatgtgagtctgaagaatctggaagaaggggtgtcaagtgtccctgtaacactgcagcttgcagaaggattaacgcagatatcagatggatatgtcagtgtgaagctgacggataagagtgtacaggaggataccaccaccgtacagaatccgagtcagagtcagagcagtactgcaccgaccggtcagaccagtgcaaatactcagacaacaactggtcagactggcacaacgagaatgacggaaacgtcgagggaagatgagagtgagacaacatcacagaaaccggaggaaacaacgacacagccggcaagtgacgaggcagaagaaacttag

SEQ ID NO: 868 - DNA, 981 bp, Ruminococcus lactaris
  misc_feature: SEQ ID N?23488835
ggaggagctgcatggtatgccaatgcaaagtcggcggatggcagtgacgcgaaagggaaaacagaggcggtaaatgtcgcgatgaaggaaaccggcgagacagaggaaagcacaacggaaccggagacacagacggagacagtcgtggaaacacagccagagacggaacaggaaacagcaccagagacacagacagaaccggaaagtgagacggagccggaaaccgagccggaaagtgtggcagagatacagacggagccggaaaccgaatcggaaacagaaccggaaacagaactggaaacagaaccacagacagaagccatcgaaagagtgacgagaccggccaattcgatgggtacggttatctgtcccgatcccgggcatcagagcaggggaaataatgaaaaagaaccaaatggaccgggttcttctaccatgaagacaaaagtggcaggtggaacaagcgggacatacagcggagttgcggaatatgaactgactcttgcgattggtctgcagctgcgggatgaattgcaaaacagaggttatacggtggtcatgacgagagagagtaatgaggtcaacctttccaacaaggagagggcggacattgccacagaagcgggggctgacctgtcgatttgtattcatgcggatggggtggataattcttccgtatccggggcatccgtactgtcaccgactacgtcaaatccatatattgcagaccttgcgggtgcgtcctggcagttatcggagtgtattctgaatgcatactgtgaggcaaccggaatgaaaaacagaggtgtgacaggaaatgataccatgaccggaattaactggagtaccaatccggtggcactgattgaacttggatttatgaccaatgcaactgacgatgccaatatgcaggatgcaacctatcaggagcggatggtttatgggattgcaaacggagtagatctctatctgcagaaataa

SEQ ID NO: 869 - DNA, 516 bp, Unknown
  BMI gene
  misc_feature: SEQ ID N?2349040
gctgcatgggattatgcagatcagaagtacaatggaaaggaggacagcataaagtcatttatgacaaaattatataacaatgttctggtacttgattccggtgcaagagcagccaccacaacatttgtggaaaatgggcagggtgatgtgctgattgcatgggaaaatgaagcgattgcaaccgtaagggaatatccggatgaatatgagattgtatcaccaagcagcagtattcttgcacagccatgtaccgcagttgttgacaggattgcagaaaaagacggaagcaaggaagcaagtacagaatatctggaatatctttattccgatgaagcacagagaatcataggggaatccggttatcgtccatatgatgaaacaatattaaacgaattttctgatacctttgatctcggtataaaattatgcaccatagatgatttcggtggttggaaagcagtctatgagaaattctttagtgatggtggtatttttgatgaaatctatggaaattaa

SEQ ID NO: 870 - DNA, 921 bp, Unknown
  BMI gene
  misc_feature: SEQ ID N?2349417
atggcactggataaacatgattatgcaaaagacagcctgaaaatgcactatgaagcgaaggggaaaatagaggttgtgtccgcagttccggtcaggaacagcgaagatttgtcacttgcgtacacaccgggggtggcagcaccctgcctggagatacagaaagatatccgtaaatcgtatgagcttaccagaagatggaatctctgcctggtggtaacagacggaacggcagtgctgggactgggagatatcggtccggaggccgctatgccggttatggagggcaaatgtgtactgttcaaatcttttggcggtgtggatgcatttccactctgtatccgcagcaaagatgtggatgagattgtaaataccataactctgatatccggcagttttggaggaattaatctggaggatatttctgcaccaagatgctttgaaatcgagaaaaagctgaaggagcgctgcgatatcccggtctttcacgatgaccagcatgggacagccgtggtaacgctggcaggactcatcaatgcactgaaactggtaaagaaacgggcagaagatatccgggtgacagtaaatggggcaggggctgctgctattgccatcacaaagcttctgttccgctatggagtgggcgatattattctctgcgaccgggcaggtgcaatctacaaaggccgtgcagaaaacatgaatccggtaaaagaagaaatcgcagagattaccaaccattccggaaaaagaggaaaactggaagatgtcataaagcaggcagatgtatttatcggtgtcagtgcaccggatgtcctgacaaaagaaatggcggagaccatggcggaaaatgcggttgtgttcgcgtgtgcaaacccggtgccggagataaacccggaaacagcaaaagcggtgggggtaaga

SEQ ID NO: 871 - DNA, 381 bp, Unknown
  BMI gene
  misc_feature: SEQ ID N?2349561
atgatctatatgaaagaaataaaacaggcgattaaccggtttcagcgggaaatcatatttcttgcattatcattaattttaatcggagtgctgtttattgcatttccggagtcatctgccagaataatctgctatgcaacgggaattgtggcgtgcatctggggattaatccgtctggttgcacattttaaggtggacagcatggaagtatttggctcttatggactggtacagggtgcaactttgctgattatcggaattgccattatagcaaagccggatgtgcttgcaaagtttgtgaccatggcatttggcattattatgctgattgacggtgtcctgaagattcagtatgccatcgaccttggaagaatcaaggca

SEQ ID NO: 872 - DNA, 261 bp, Unknown
  BMI gene
  misc_feature: SEQ ID N?2350068
atggataaaacaaaggaaagttttaaaaattataatctggaggacaataataagatggaaaagattaagatgacaacaccattagttgagatggacggggatgaaatgacaagaatcctttggaaatggattaaggatgagttattacttccgtttatagatttaaaaactgagtactatgatttgggacttgaatacagaaatgcgacggacgataaagttacgacagaatctgcagaagcaaccaaaaaatatggtgta

SEQ ID NO: 873 - DNA, 3096 bp, Coprococcus eutactus
  misc_feature: SEQ ID N?2350114
atgaatggagtgatgaaaatgaaaaagaaaataattaagaagaggattcttgccggattgctggcatttgcacttattgtgccggcaaatgtggcaggagcaaaaacgcagacggtattggaaacaaatgtgacagaggcatcggaaggatgtacaatgcttggtgtatatggttcctattttgcacaggcgaaggaagcccttgctaagatcaatgaaattcgaaaagaagcatgtgaagcaggaaatatacgagatccgagaaattccggcagatatcttcagccatcggattatgttcccttgaaatggtcgagtgatttagagtatattgcacgtatccgtgcggcagaagcgggaattgcattccggtttatggattccggacatgaccgtttgaatgaaaagggtactttttccattggcagtaatgggataacttcttcttctgaagatcttgcttattattatgtaaaggatatgcttgaaggagttttgctttggtacagtgaaaaacaatattgggtaaaacaggatttcagtgaggaaacccgtcattatacaagtatgatcaacccgaagtatacctatgttggttttggcggtttttattcagaggctgctccgtatccggcaacaatggcaggagagttttccgcaaaatcggatttggatgagacaatgatggaagcaccggaagatgtgatgcagaagatcgaagtatcaaatgactatatacaggaaacgtatctggacggggatgaccagatttttacaaatggaacgacgacggtgacgccgcgtgtgaaacttcgaagaaacaatgcaattcgtaatgtgtggtcaatggaagatgttacctatacttcatcggatccggcggtggcgacggtgacgcaggatggtcaggtgacagtaattaccaatggaacggttaccattacggcaaaatccggggacacgatcgtagcgcaaaaagaaatcacagtaaaatgtaatcatccgagaaaaatgacatcgtatacggaatctacatgtacgaaagaaggaaaaaaacaatattattgtgccatttgccagaatacgatagaagaagtcgtggcgaaaaaagcacatgattatgtttatggagaggcagattccgagggaaaaagcaccggaaaatgttccgtgtgcggcgatacgatacgtattactctgccgacaaatatgaaattgtattggcaaaacagcacaagttctatctccagttattcgccggtttttccgacgagcaacccggtaggatccttgttatactgttggattcaggcgagtgatggagacccggattatcaggatatggtaatggaatccacaaatgaagaagtggcagcagcaccggaaaaggcgagcaataatgcaccatacgaccattttgagattttggcaggaggaatcacgaaattgagtgtatatccgaagtacaatccacgcattaagcagacctttatgctgcgtgtcggtggcaaaggaagtcgggacatttcggatatggatgtcagcttgtcaaaagacacctttatctatgatggaaatgcctgtaagccggaagtgacggtatcttaccgaaaagacacggtgctggagcagggtattgattatacgatttcctatgaaaagaatgtcaatgccggaacggcgacagctgttatttccggaaaaggactgttctatggaaaaatccgaaaagattttacgattcagaaaacaggagaagaatcccacatccatgaggtggtcattgatgaagcagttgcagctacttgtaccagagacggtgtgacagagggaagtcattgctcgaagtgtggtgaggtgctggaggaacagacagtcattccggcgatgggacatcagtatgccggaggaacgtgcgaaaggtgcggagacattctttatatcgaaatagatggagtgcgttatacaaaggaagaagacctttccggtaatgtgacgatacatgtttgtgcgaaaccgggggagaagatttccggtaaagtgaacattccggcaaaggttgcgatgggagatatggcttatacagttacggttattgatgtcaatgcatttgctgatcagacagaacttacctatgtgacattgccaaaaacaattaccaatattggaaacaaagcatttgccggctgtaccgccctggaaggaatgaaatttaaggcaaagatagcaccagaggcagcagaggacgcttgggaaggagctggaaccgaagatttcacgatactaactccgaaaaatgcgagggattattacaacattaaaaaaatatccggagcgacagttcgtccggaaacggatgcagaacatgaacacgatatgcagaaatttgaagcaaaggcaccgacatgtactcagccgggaactatcgaatattacatttgccgggactgtgacaagatgtatgcagatgaggatggcaaagaatgcattttgctcacagaaacttatttgcagccactgggacatgaatgggagtcggatttcacgattgatatcccggcgacggcgacgacgcagggcgaaaagtccattcactgccgtcggtgtggagaacgttcccgcatcgtaaaatattcgctggaagatgaaaagaatagttccaatgacaatgaggacacagaatatggtagaaagataacgtattcgtatctgttaaaaggttctttatttaaggcaaaaggacttcgttaccgggtcaatgccgtcaatgcgaaaaagggcatctttgatgtcacctgcatgggcagcaactcaaagaagatcaaaaaaataacagtgccaaattatgtaaaatacaaaggaatccattatcgtgtcacgggaatcggcaagaacgcgtttgccggctgccgcaaagtaaaaacggtaaagattcagagtatgtatctcaagaaaaagaatattgggaagaatgcttttcgtggaattccgagaaaagcatcggtttatgtgccgcccggaaaaatgaaaagctatcgaaaatggctgaaaaaagcaggattgaaatgccaaggaggaaaaaaatggaaaagataa

SEQ ID NO: 874 - DNA, 1044 bp, Eubacterium hallii
  misc_feature: SEQ ID N?2350780
atgcttctgacaggctgtaaagccagggatcagaaatcagcggatcagaatgtggaaagtgcggacaagcagcaggaagaaaccagcctggatacggcatcgcagaaaaaagtacagaaaaatgtttttgcgatggatacttatatgacggtgtccgcatatggcgaaaatgcagagaaagccgtggacgcggcaatcgatgagataaaccgtctggacgttcttttgtccacaggaaaagataccagtcaggtggcatgcatcaaccagaacggctctgcggtgctgaacgatgatacacagacattgctgcagaaatcactggagttatatgaatccaccggacaccgttttgatattacgatttatccgatcatgtgtgtgtggggatttcctacacaggaataccgtgttccggaacaggacgagatagctaaaacactggaactggtaggaagtgataaattatcttatgacgaagcgacaaagacactgaccctgcgggacggcatggcgatagattttggcggtattgcaaaagggtatacttctttccggctggtggagatcttccgggaatataatgtaagctccgcaatggtttcgctcggcggaaatgtccaggtactgggtacaaaaacggacggttcggattggagagtagccgtacagaatccggatggaacagatgattatttaggcatactggcgatcaaagataaggccgtcattacttccggcggatatgagcgttattttgagaaagatggaaaaacataccatcacattatggataatgaaaccggaaaaccggcggactcggatctgatatccgttacgattatcagtaaggacggtatgcttgcggacggattatccaccgcattatttgtcatgggaaaagaagatgcattgaattactggagagaacacagtgaagaatttgatgccatactggtaacgaaggatggagaaattacggtgacacagggaatcgcagattcattttcttcagagaggaattatgatatcgcagaaaggtaa

SEQ ID NO: 875 - DNA, 807 bp, Unknown
  BMI gene
  misc_feature: SEQ ID N?2351118
tgggatgattataaagagaaagtaaaagaacttgcagattatgcaaaagaaacgggtgtcggtctctggctctggtatggtgtaaatgatgtcagccatacagcggcaggtgcatatccggaccattcccttttgaacaaagaaaatatcaccagtgaatttgaatgggcttcttctattggaatcaaaggtgtgaaagtcgattattacgaaagtgacaatcaggctgccatgaaccagatgtatttgtgtgcagacattgcggcagacaatgaactgatggtacttttccacggatgtaccaatccgggcggagaaaacaggacatttccaaatgtgatttcttatgaggcagtatacggggcagagtattataaatggcgttccgaaccgtccacagcaaatattatcaactatctgtttaccagaaacgcagtcggttctgcagattttacaccaactgcacttccggttgccaatattgatgcaacctatggatttatgcttgcagtcagtgcatacctcgaatccggtatcgtgcattttgcagaaaatgtcaatgtgtatgaaggattttccggattatcctttatgaatgaactgccttcttcctgggacgaaaccgtggtactcgaaggaaagccgggaagctatggaaccgtggcaagacgtgccggagagaactggtttgtggcaggtcttaccacacagaaaagagaaacggagattccgcttgatttcctcgcagatggaaagacttatgatgcagtgatttaccgcacagcggaagataacagtggtctggat

SEQ ID NO: 876 - DNA, 897 bp, Ruminococcus obeum
  misc_feature: SEQ ID N?2351464
atgtcagtagtgctgtttgtggttggtatctggattactgtcattgacagtgatgcgggttcgattattctgagtctggctatcgtgtatctgatctttacgattgtaatgtatgtggtaaatcagaagctggtaatgcaggagctgattaaattcgccgtggattatgcgcaggttcagaaagaactgctggatgatatggttattccctatggtctgattgaccggcaggggaatattctgtggcaggatggcgaaatgtcacatctgttgcggcgtgaatacgggaaacgtgtgccggaagtgtttaaggaaattacagatgaacatctggaactgggcgatgaaataaaagaaatgcatattaatttcaaagatcatttttatcgtgtgcagttaaagagagtggatacagataaggcatttaacaatacggagattctcgatattgaaaatcaggagtatgtgattgccatgtatatgtttgacgaaacaaggctcagaaaaatcgaaaaagagaattttgatcagaagctggttgttggactgatttatattgataattatgaggaagtgctgcagagtgtggaggatgtgagggcatcgcttctggcagcactgatcgatagaaagatcaataaatttgtttccaatattgacggaattgtccgtaaactggaaaaagacaaatatttcatggtactgaaaaggcagtcgctggaagcgatccgatcggagaaattcgacattgtcgatgatgtaaaaacggtaagcatagggaatgaactgcaggtaacaatcagtatcggcatcggcatgggtgcggaaacctatggacagttgtgtgattattcgagagcagccatggatcttgcactgggccgcggtggtgatcag

SEQ ID NO: 877 - DNA, 531 bp, Unknown
  BMI gene
  misc_feature: SEQ ID N?2351562
atgatcgtatcaggaatcggaattgccattgcagcagtcgctattggtgtggcagctgcaataagtaatccgggttcggagaagaatagtattcaggctgtatccggtcggacaacagagagtaaggaaaatgacatggaacttccggttctgccgattggtacggatggaaaatctgattcaaaggagcagacggagtccacagtggaaaaggatgatccgaaatcgtctgacacaaagaatacatccggtgcagacagcgaagtgcaggcagataaaaagccttcacattcggacagtcaggaatcatcggattctaaagcgaatacagcaggacagaaggatcaggcagagaatacagaccgtgatcaaagcaatgatgacaatggcaaagattccagtacaaggtcagatcagacaacggataacaacaaaaaacaggaaagtcagaaagatagtgaatcagataaatcggattccaacaagaaaagttcggatacgatagagcttccatttattccggcagactaa

SEQ ID NO: 878 - DNA, 795 bp, Unknown
  BMI gene
  misc_feature: SEQ ID N?2352545
atgaaaacagcattgacgattgcaggaagtgattcaagcggtggagccggtattcaggcggatattaaaacaatgatggcaaaccgtgtgtatgcgatgagtgcggttacggcactgacagcacagaatacaacgggtgtatatgggattatgaatgtgacaccggaatttttaaagcagcagatagatgctgtttttaccgatatttttccggatgccgtgaagataggaatggtatcggaagcatccctgatagaagtgatagcagaacggttgggatattatcaggcaaggcatattgtggtggaccctgtgatggtttccaccagcgggacaaggctgattcaggatgaagcggttgaaatcttaaagaaagaactgttcccgcttgcagaactgattaccccgaatattccggaagcagaggttctgacaggattcgatatccggacggcagaagatatggaaaaggcggcagaaaaaatctgtgaaacatatcattgttcggtattgttaaagggcggtcatcaggtacatacggcgaatgatattctgtgcagtgaagccggcaaggtatggtttaacggaaagaggattgataatccgaatacgcatggaacgggatgcaccctgtcatctgcaattgcatccaatctggcaaataatatgccacttcgtgaagcggtaggtgcggcaaaggagtatatttcggctgcacttgcagatatgctggatctgggcagaggaagcggaccgatgaaccatggatttgcactgtgcaaaaagaatccgtaa

SEQ ID NO: 879 - DNA, 261 bp, Unknown
  BMI gene
  misc_feature: SEQ ID N?2352662
atggtaaaactggataatgttacggaagaagtattaagtgtaatcaatgataataaattcagtcagagcggagcttttaatctgagacagaatggtacatccatctgccatggtgacagtgagcatattaagataaagaaaaaagcagacaaaccgggaattgatatttatatcgatgggaagacaaaaggtgaagccgtgtatattccggtagtagtcagtgtatccggtatgacggatcttgtatacaatgatttttat

SEQ ID NO: 880 - DNA, 549 bp, Unknown
  BMI gene
  misc_feature: SEQ ID N?2352693
tatgataaagtattggaattatgtggaacaacacaggatgagattagccgtaagatacaatccggaagttggtatacctggattctgtacagggggtatatttactatatctattcttattatgccggcagtgaagaagatacttactatctaaacggaagtcattgtatataccggatggcactggatggaaaatcagaaccggagtgcctgatgccggtaacaccgggttccgtcagcgagttagtacagtttcagacggcaggagattatgtctatatgagtgtgccggacacacatgaagataaggacgcatatggcggctgtaagtatcgttataacattgcaggagatcagatggaaaaacttacttttctgggggaagatatactgggaatgacaattacgggagaatatctgtactacagcacacagtcagagccggaacgaatcaagtattataatctggaaaatgatgagtatggagaattatttacactgaccgggacggaatatcctttgttttccaggctggaatcagacgaggat

SEQ ID NO: 881 - DNA, 597 bp, Eubacterium hallii
  misc_feature: SEQ ID N?2353128
aagcttctggcattactgattggctgtatgttatttatttactttgtaaccaatcctcttctggttttcttatgcatccgccagaatccatttccattgattctgaaatgtctgaaagacagtgctataaccgcattttttacccgcagctctgctgcaaatattccggtcaatatgaaaatctgcgaagaactgaaactggacaaaaatacttactccgttaccattcctctcggcgcaaccattaatatgaacggagcggccatcaccatcacagtcatgacacttgccgcagtccacaccctgggaatcgaagtaagttttcctaccgcaattattttaagtcttctggcaaccctgtcagcctgcggtgcttccggtgtagcaggaggatcactgcttttaatcccaatggcatgttccttatttaatattccaaacgacattgccatgcaggtcgttggcatcggctttatcatcggtgttatccaggattccatggaaacagctttgaattcatcttctgatcttttattatctgccacggcagaattccgtgaatggagcaaagacggaaaaaagatgaggatttattag

SEQ ID NO: 882 - DNA, 2457 bp, Unknown
  BMI gene
  misc_feature: SEQ ID N?2353441
ctgaccagccagacattctatgcaaagtacggggaaaactttgactttagctccctggaggagacaggcaccgcagcaaatcaggtgtatacaaagtttgctggtgtagagagtgagacaggatttgatttcacacagccgataaatggtaagatggcagaagcattgctttccggcattatagcagaagcagtctatgtggataacagtgcaaaagtaacgtttagcttcacaggattagaccatgaggatatcgtacagattgcacagaagggaacctatccggatttctcagaggcagaagagattgtatcttacaatggactttccattaaggatatctcaccagctatgagtaaactgaccggtccagtggtttaccagattgtctgcggacagattatcggaccggatgcagccgtgaagttccatgaaaatggaggaagcgaggttgctgatattgtaaaagtagaaggaagcctgataggcgttcttccagtatcacaaagagatggttatacttttgcaggctggtacttagatgatggaacctttgaaaatgaatttgcagaaagaaagatgccggtaggcggagccgaggtttacgcaaagtggattccaaaggaatatgaagtcagcttccatgtcaatggaggaaatgaacttggcgaaggcgaaactgccaagactgtaacctacgacggagtttatggcacactgccacagccggagagaaccggatatgcatttgatggctggtttaccgcacaggaaaacggcagccaggtcactgaggaaactcctgtaaagataacagaaaaccagacgctctatgcacactggagaaagttagtagacattgacaaatcggtatttgactttggtgagatagaagaggaaacttatgaaaagggagtgactcatagtcctgtctatacctttgatgcgggagatgcagctgtttcagaagatgaatttacgatgaaatatatgcgccagggcaatacagactatgaagagggatttccggtcaatgcaggtgtttataatgtcaccatttccagaccggccgacaatgtctatgcgaaatttgagcagacctatgaagcggtactgaaaatcgacaaggcagtcagaaacatagaggctggagagattgtagacagcggatatacctatctgaaaacaaatgcaggagacatcgatgatttatctgataaagcggtattaacgcttacagtaactggttataatggtttgcgggatgctgaactttgtacgaataatatggaaaaagacagaattgattatttgacaccaggaatcacctatgacgtttatatctcgattacagatgacccgaattatgaagatgtagcaaggacactgtatattccgtctgcatccaccacagaatattcgacggaaagctggaacggtcatgcggataccagctggtataatgatgcggatacagagtttactatcacgacaccagagcagcttgcaggtgtatccttgcttggtgaaaactttgcaggaaaaacgattctgcttggtgcagatattgatatgacaggctatgaatgggtaccgattgatgactttgcaggaacctttgatggacagaatcatactattagcggtatgtttagtacaaagagtgatgattgtaagggacttttcggatatataagttcagatgcagaagcaatcattgccaatgtcagagtggaagattccatctttgagaatgcaacctatataggtggtattgccggaagaatacggagtggaagcattaccaactgtgtcagtgctgttgtggcagtaggtacaacatataccggaggcattgcaggatatagtgatggagcaactatctcaaaatgtatttcctatggtaaaattctagatcgttattgggcaaacactattaatttaaattatataggaggaattgtaggctatatcagtacttctaaagttacaaactgtgcaaactttgcgacaatttatacctttccaaaaaataatgcctggcttttatttaagtatacatttggcggaggaatagtgggtgtatccaattataaagatgagatttataactgttataatgccggacgaatcattgtacataagaatggtcgatgtggagcaatcctcggagcagcgagtggaaatgttcatgataacgaccgcgtagttgtggagcagtgttatttcctgaaggatacgatattcacgaacaatgcaatttatgcagagagttctataacaactatcaaatcacagaagacagcctggtttacaagtcctgcttcagagatgagcagtgtttgtgaagagggcacagcaggcatgaaccttgtaaatacattaaatacatggtcaaaacgtgtggatggcacagatgtctgggaagtaacagaaggaaatgcatatccaaccatc

SEQ ID NO: 883 - DNA, 2820 bp, Clostridium cellulolyticum
  misc_feature: SEQ ID N?2353442
gaggacggggacggcgtttatacggtaagtgcaccggaaggattccacaaaggatgctcctatgaactgacccttgcagacggctgggtgttcaaagacaaggaggaaaccatccgtacggcagccttctccattgcgatggacgaggtgcagaacctgcagatgaatgatgcaatcacttaccttgcagataccgatgagatggactatgtgatggacggagagacctatgcggtattaagtgaggacaacctgacagaagacgggggaacgtttgtcactgaagatgccggggaaatggaagacggggatattctttgtatctatacaggaataaagccgaccgaaagaaatgcggaaaatgcaaaggaactccttgaccctgccgtatatgtaaaggtaacgggaatcaacggggagaaagtcagctttgccccgcttggaagagaggaacaggcagagttatatgacattccggacaacttcccgctgcaggtggagagcctgccggaaggagaggaaggcacagtaaatatcagtgctttggatgaggaactgtaccaggaaatgtacggggaagacggaaactacgaagctgccctggaaaaaatttccagcggtgatttcctgactctttatacctccgaagaagcaatttccagtgaggaagacatatactatgcaagagtgacggattacaatgcagaaacaggcgaaatcacctaccagaaatccagtaagcaggaaatctttgacagcatggacctttacacagatatccatgtctccggggatgacctgatttcggatgaggaaaaagaagtcctggaacagcagctccagacccaggtggaagagagtggatttgcagacgaggcggctgccttcttaagcggggtggcagaacagacggatgcaggcatccaggtattaaaccttggcggtaattttgaactttccgatgatgtgaagttaaaagtggaattaatcaacaagggagaacagttacatttcggggatggcatccagcttgcggtaaaggcagatgcaacctttgaggcagagacagaagaaggcaagacagcgattgatgtcagtgccacttttgtggaagaagtttctgtccatcctgcagtccggggaagcattgtcacgaaaaaaattctcggatttattccagttccaatcggagtggaagttaatgcatccgtagacattaagaattacacagcattttcctttaatgcagagatttacagtgtagaagcggacgaggaagatatctgggaacagataaaagcaatccttaatgacccttccgaattattaggactggagaaccttccagacggtctggcaaagggattatccacagcatctgatgtgatggataaaatcaacgaattacagactaagatagaaaaggcagaggatacggcagaaaccatccaggggtataaagaagatgtcgatgccctgtggcaggtgatggaaaacaatgatctgaccaccagggaagagtggcaggaaatgggcgaagcccttgaaaagaccaacgcagcttctgaccttctggatatgatgaacctgtctgatacctatacagatacggaaatctcaccggaatacagacagtccatgcaggatttgatgaataagtacagtgagattgtgcagaaagaaaccgaatggatgaagttagtcgataaggaaatctacagcacagaataccgttactacggtcttgccatcggtattgagacaagcttcattgtacggtcagacttaagccttgcgattggctccaatctgcagtacgaagtcggaaaacgttataacttctggttcaggattggtttattctcaccgacagccggaaactcctccatggatttgatggatgagcagttccacttccagttctatgtcatgggaagacttggcgtaaaggcaggtgtggaggcaaaactctatgtgggactcggcaccggtaaatttgcatccgtcggcattaccgcggaacttggaccatatgcgaaaatctatggattcttcgtctatgaatatgacagataccgtgcggcaaactccggccagcagacctcgaaagagcgcatggcaggtgcgttataccttgatttcggattatactttatgctgggatttgaggcaaatgcattgggcaatctgtttgaatacagctacaacttcttagataaggagattcctctcctgacagcgggagcacaaaagtattattttgaacctgcttaccagccggaggaagatgaaaaggttattttaagggatgacgatgaggacagcacgaacggcatcacagcaactcttgccgatgagttaagagcactgagatacctggatttaaagaccggtatcatcggaagtgaaccgcttgagtacagtgcatatcagatgacgctgtcaaacccgaatttcacactgaataaggacaatggcaccattacggtcaatgttccggaaggcacccgctacatggaatgtgatttgaccatcacttatctgtatagcaagctggcattctccaggtatgacatgaccgtcacgattccactggtatggaccagtctttccacggatgaactgaaggaatactataccgtttctgtcagagttggaaatgatgcggacggataccagacggtatggagccagaaggtattaaagaaccagccatacaatctgccaacggaggaagaaatccgtgacctgattggatggaatgatgcaaaatacatacagggaagcggttatggagatatccagaccacagaccttacc

SEQ ID NO: 884 - DNA, 351 bp, Clostridium nexile
  misc_feature: SEQ ID N?2353729
atacatgatgccaatgtgggcgaagtaaaaatagcagatgatgtggtggccattattgcaggaattgcagcaaccgaagttgaaggcgtcgcttctatggctggaaatattacaaaagagattatttccaaattaggaatgaaaaacctctcaaaaggtgtaaaagtaaatgttgaagatggcagtgtgatcgttgatttatcattaaatataaagtatggatatggtgtgccggaagtttcagcaaatgttcaggataaagtaaaaacatcaatagagaacatgacaggacttacagtttcagaagtaaatgtccagattgcaggtgttgcagtagaaggcacaaaataa

SEQ ID NO: 885 - DNA, 783 bp, Ruminococcus obeum
  misc_feature: SEQ ID N?2354373
atgagtttcgaatttatacgaaaactgcctacaccggcagagattaaagagcaatatccggttcctgccgatattgcagagatgaaagcaaaaagagatcaggagatagcagatgtatttaccggaaaatctgataaattcctgatgattatcggaccttgctctgcggataacgaagatgcagtgatcgattacatatcaagactgaagaaggtacaggaaaagatcagtgataaagtactgatcattccacgtatctatacaaataagccgaggaccacaggagaaggatacaagggtatgcttcatcagccggatccggagaagaaaccggatatgttaaatggacttcttgcgatcagacatcttcatatccgtgcaatgaaagaaaccggtctgacatctgcggacgagatgctttatccggataactaccgttacctttccgatatcttatcttatgtagcaattggggcccgttccgttgaggatcagcagcatcgtctgactgccagcggcatggatgtaccttgcggcatgaagaatccgaccagcggaacgttatccgtaatgatgaactctgtagtggcagcccagatgggtcataccttcctttatcgcggatgggaagtaaaaaccagcggaaatcctctggcacatacgattttaagaggttctcagaataagaacggacacaccattccaaactatcattatgaagatttaagactcttacatgatttatatgcagagaagaatcttgcaaaccctgcggttatcgta

SEQ ID NO: 886 - DNA, 162 bp, Unknown
  BMI gene
  misc_feature: SEQ ID N?2354374
catttaaaacagcatagaaatataattgaaaatgaagaaaaagtgtattataatacaccaatgtgctttttagtgcttaataacttaccgcattgcggtgactggaggaaagaacatgagtttcgaatttatacgaaaactgcctacaccggcagagattaa

SEQ ID NO: 887 - DNA, 1359 bp, Unknown
  BMI gene
  misc_feature: SEQ ID N?2354720
atgaatattattattgccggatgtggaaaagtaggatgtacactggcagaacaactgaatgcggaaggccatgaggtatcagttatagataatgatgcacaggcattgcaaaatgcatcatcaaggtttgatgttatgggagtggaaggaaactgtaccagttaccgtgttcagacagaagcgggaatcgatgatgcggatctgatgattgccgtgacagataaggatgagttaaatatgcttgcctgcctgattgcgaagaaagcaggtgactgtcatacgatcgcaagggtaagaaatccggaatattacgaagaaattaattacatcagggaagaacttggtctgtccatgtccattaatccggagctggcagcggcatccgaaattgcaagactcattcaggtgccgtccgcactggaggtcgatacctttgcaaaaggaagagtcagcctgatcaagatccagattccacagggatccgtactggataatatggcgatttgcaatatggcagaaaaaatcagccagaaggtgctgatctgtatcgtggaaagagagaaagaagttgttatcccaggaggaaattttgtgctgaaagcaggggattatatctctgtaacagtagccattccggagataaatcatttccttaaccagattggaattagaacgaagccgattcataatgtcatgattgcaggtggcgggacaatctcctattatctggcgaaattacttttggcagcacatataaatgtaaaaatcgtggaacataatctggagcgctgtaatgaattaagcgatctgcttcctcatgccatgattatttatggagatgtgacggaaagagagattctgatggaggaaaatatcgaagatgcggatgcggtagtggcactgacaaattcggatgaggagaatgtgttgctttccctgtttgtgaataaattatcaaaggcaaaacgaatcgtaaagataacaagagaatcctttatggaagtcatcgatgagatgccggttggaaatattgtatcgccgaagaatattacggcagaatacattatccgttatgtccgttccagacagaattcatatgacagcagtaatgttgaaacactgtaccggctggtaggtggaaaggcagaagcccttgaattcgttgtgggaagcaatgcgaaggcagccaataaggagatttgcgaattaaatatcagggacaataccctgatctgcagcatttaccgtaatggaaaagtgatacgtccgacaggaaaggataagattcttccaaaagacagtgtaatggtagttacgacaaaaaaaggtctgaatggaattgatgatatagtaaagtaa

SEQ ID NO: 888 - DNA, 543 bp, Bacteroides pectinophilus
  misc_feature: SEQ ID N?2354764
gaactgatgaaccatgtttcttatgtatttcaggacagtaagcttttaaaaacaagtattctggaaaatgtccgcatgggaagaccggacgcatcggaacaggaagtcctgcaggcattaaaagaagcacagtgcatggatattctggaaaaatttccggacggcgtgaatacagttatcggttcaaaaggaatctatgtatccggcggagaggcacagagacttgccattgcaagggcatttctgaaaaatgcaccggttctgatactggacgaagccacggcatttgcagacccggacaatgaagtgctggcgcagaaagcatttgaaaatctttccagaaataaaacagtcattatgattgcacatcgtctgtccactatcacaggtgcggacagaatctatgtattaaaagatggcaaaatcgcagaggaaggcacacacgaagaactgacaaagcagaatggaatttatacccatatgtggaaagaatacaatcagtccgttaattggaaagtgggaaggagaggtgaatctgtatga

SEQ ID NO: 889 - DNA, 747 bp, Unknown
  BMI gene
  misc_feature: SEQ ID N?2354794
agtggtacggaagcagccaaagaagccggaaaaatcgttattctggatgataacttcaaatccatcaaggatgcgatctggtatggacgtacgatttaccacaatatcctgaaattctgtaaattccagctggttatcaacgtggcagcagtcgttgtcagtgcgatcgcaccattcttcggagtggaagaaccgctgaaggttacacatcttctctttgtaaacctcgttatggatggactgggtgcaatcatgcttggaaatgagcctgcccttgagaagtacatggatgaagcaccgagaagaagagatgaaagcattgtcagcaaaaagatgatgacacagattgttatcatgggtgcatggcttacgattgtcagctttgtgttcctgaaagttccgttcttcaaagaaacattctttgacggggatcagaagaaacttctgaccggttactttgtactctttatcgcatccgcactgtttaacggattcaatgtccgtgatgacggattcggtatctttaagggactgaatgagaataccggtttcctgaaggtattcttcatcatcatcctggtgcaggcacttattgtaaatgccggattggtaccagtcctcggagttatcggagaaatgttcagctgcgttccatttggaattacaggctgggttgtagtatttgtccttgcatttaccatgataccggtggatatgatccgaaagatttttacaaaaggaaaataa

SEQ ID NO: 890 - DNA, 405 bp, Roseburia inulinivorans
  misc_feature: SEQ ID N?2355321
atggataagttaatatacagagtaaaagcgatcgcaaaaagtacattgattttactgctgattattttagtaatgattatgatgtaccagattaagaaattacatggaacagcgagagtaattaattatgccggattggtgcgtggtgcgacgcagagggaagtaaagcttgagattacaggaaattccgatgatgatctgattacttacctggacgatattttaagcggattaagatatgaggacgggaattacgatctgattctgctggatgataaggattaccagaaaaagctggatgtgcagattgcctattgggaagaactcaaggaagagatacagaaagtaaggacggatggttatcttaagacaaatattgttgacatgagtgaagcttattttaaa

SEQ ID NO: 891 - DNA, 819 bp, Bacteroides pectinophilus
  misc_feature: SEQ ID N?2356009
aaattgcaggaactaagaggcaaagaagacactcccatgaccaaggtcatctatgataccatgttccgtaaccagaaactggctctggaaatggatcgtccttcctgtcaggacactggggtattacagttctgggtaaaatgcggtacaaaattcccacttattgatgatctggaaggattgttaaaagatgcggtagtacaggcaacctttgcgacaccgttacgtcacaattccgtagagacttttgatgagtacaataccggaaaaaatgttggaaagggaactcctacggtatggtgggatattgttccaaactcggatcagtgtgagatctatacttacatggctggtggcggatgtacgcttccgggtaacgctaccgttctgatgccgggagaaggatatgaaggtgtgacgaagttcgtgctggaccgtatgacttcttatggattaaatgcctgtccaccattgctggtaggtgtcggcataggcacttccgtagagactgcagcactgaactccaaaaaagcactgatgagacaaataggctctcataatgataatgaaaaggcagccaagatggagaagctgttggaagatggtatcaatgccattggtcttggtccgcagggcatgggtggaaattactctgtcatgggggtcaatatcgagaataccgcacgtcatccgtctgcgattggtgttgctgtaaatgtgggatgttggagccacagaagaggacatatcatttttgataaagatctgaactttacggtagacacacataccggttttgaatacaaggaagagaactaa

SEQ ID NO: 892 - DNA, 534 bp, Clostridium hylemonae
  misc_feature: SEQ ID N?2356338
atggaaaaattaaaaatggatttaaaatatcataagctttcactgcttatccggctgattgtaaatattgctgcaattcttaccgtaggtacattgattgcaattgtggtgtatattctgtaccggggaattccgaatattaccccgcagatgtttgaagcgaaatataccagtgaaaatgcatccgttgttcctgccttaataaatacattgattacgattgtcgtaacactgcttatcgcagttccaatcggtattttctcagcggtatacatgacagaatatgcaaagagaggaaataaactggtcaaggttgtccgtttaatgtcagaaactttatccggtattccatccattgtatttggtttattcggctatctgttctttgtggtagcctgcaaatttgattattccctgctggcaggttctttaaccctcgccatcatggttcttccgacgattatgacaacgacggaagaagcactgcggtccataccggattcttatcgggagggaagttttggactgggagcc

SEQ ID NO: 893 - DNA, 1029 bp, Unknown
  BMI gene
  misc_feature: SEQ ID N?2357787
atctggatcgactgccgcggaacgataatcagtgaaggagataagccgctctatcttttcggctgcattaacgaaatcggtgctgtccagaaagcagataatgtaagtggtcttttaggagaatccacgctgaaatcctatatccagcagtttctcccaaaacttccgaacggttttctgctccgcatcggactggatgacttcaagaagataaacgaaaaactcggaacggattatggtgatcgcatgctgaagcgaactgccgatgatatttcttcctgtattcttcccggtcagaaaatttaccgggtacagtcggacgaatttatcgtactggattttgccggtggcacagaagccatcgccattgatttatacaagcgtatccgaagctttatcagcaaatttgttgcagacaatcactatgaagcagtatttaccatatcggcaggtctgctgaccagtgaaaacattatccagcacacttattcggacattatgaaatattcggatttttcactgaatgaggcgaaacgtcagggcaaaaatctctgttatattttccagcaggcagattatgacaaattctgccgccggcaggaactgaccaaagttctccgtcagtcaattaacgaaggattcaacggctttgaggcgtatttccagccattgtttgcaagccggaccaataccttatatggtgcggaatccctgatgcgttttcgttcagaatctggcaatatgatatctcccggtgagtttattccgattctggaagaaacagggctgattattccagtaggacagtggatgctccatacggttttgaaacgtgcgaaagaaattatcgaaatttgtccggacttccatatcagcattaatgtttcctatatccaggtaatgaagagtgacattatcaacgagattatccgtgcggtttccggttatcagattccaccatccaatgtcattgtggaattgacagaaagtggtctgcttgtttccaatctccagcttgcaaagacctag

SEQ ID NO: 894 - DNA, 612 bp, Catenibacterium mitsuokai
  misc_feature: SEQ ID N?2358117
atggatttaaaaagacaggcatcagctccgttgtatgaggcaatcgagaaattcaggaaaaaaaggattgtaccttttgatgtgccaggacataaaagaggccgaggaaattcggaactggtagatttacttggcgaacgttgtgtggggattgatgtcaattcgatgaaaccgctggataatctgtgccaccccgtatcggtcatcaaggaggcggaggagctgacagcagaggcatttggtgccagacatgcattttttatggtgggaggcaccacccaggcggtccagaacatggtgctgtccgtatgtaaagcgggagatgagattatcgttccaagaaatgtacacaaaagtgtgataaatgcgctgattttatgcggtgccaccccggtatatttaaacacggaaatcaatgccaaacttgggattgtactgggggtaacggtcggacaggtcgaaaaaaccatcaaagaacacccaaaggcggtggctgtgctggttaataatcctacgtattacggcatctgttccgatatcaggggaatctgtgaagtggcacacaggcatggactgaaagtattagcggacgaagcacatgggacgcatctg

SEQ ID NO: 895 - DNA, 387 bp, Dorea formicigenerans
  misc_feature: SEQ ID N?2358284
accatccgtgtcctgaccaatgaatccatccgtccgaaggataaacgcagactgatttttaaagaagtacgtgttggattatccaatggatttctgctcggaaccctgaccttcgtttttatcggactatatattttatttttcaaatcccagacgccattatttgcattttccgtatccggatgcatcggtctcgccctgatggtggcgatgggtatttcaagccttatgggaactacaattcctatcagcctgaagaaattgggcatggatcctgccgttgcatccggtcccctgattaccaccatgaatgacctcgccgctgttattacctattacggcatggcatggttactgttaattaatacattacaccttgcaggctga

SEQ ID NO: 896 - DNA, 660 bp, Unknown
  BMI gene
  misc_feature: SEQ ID N?2358336
atgaaaaataaaaacagtcttaccatatttgatgtaagaaggcagaagaaaaaacgttttatcatatggacacttgtcatcgtgattatcatgacaacctgttttggtcaggcaccgcttgtttcagaggctgatgtggatgataaaccggagaattacacttatttccagtgtatcgtggatgaaatgacaaaggataaagaccggaaattcacgattcttgagattgtgccggacacatcctgttcggaattccttttttacggagcagataaatccatacgcgataaactggactggatcaatgaaaatgagcaggataccacgattcggagatggtttggaacaatcggcggctgggacggtgcggtcatggcacagagccagtaccagttaaatgccgatggattcagcaatttcaaattcacatttaatatcagcagacttacgggaaagaagtatgttgaagtagaaaatatgtttttgaattatgttctgacagattatgtggatttcatggaagaccgtctggtcatcagtaccaaagcggcaaatgaagtgaccgtggaggatgtgcagaatgcggattttgtatatgtaagtacgaaatgccatgataataatacctacacaacaaaccagttctttaatggatatatg

SEQ ID NO: 897 - DNA, 480 bp, Unknown
  BMI gene
  misc_feature: SEQ ID N?2359154
atgcataagagagcaattcttatggcaggcatattaggtatgcttgccacgtcctctgtatttgcagaggaatttcccatcgagggagtaaccatcgagggaagcaccgagatagccataggagaggtagatgagaatggaaatccgataccgattacgattggaaacactctgaccgaagaagaaaaagaacagagaaaccccatcctgtccatagaagaaacaggagaggggtattccgtcacggtggcactgtcagaagcagggaaaaataacggagatgcactggtagaccttaccgtgacggattctggtgggaatgaggtatactttgaaaaagtagcatcattagaagatgagaagcatgaaacagcgatggtagaatcggttgctgtttcgtgcttctctttttctgtgttatctgtttcagatgaaaaattcccggttatgataccggagcagaatctttctgttcgatga

SEQ ID NO: 898 - DNA, 783 bp, Unknown
  BMI gene
  misc_feature: SEQ ID N?2359806
gatatgaatctgaaccgcctgacaaacaaggcaatctatcttttatgctggctgaaccggtacggatcggggctgttttccaactgggaatacccgcagaccggctgctttatcaaattaggcggatgcaaaactgagaatgaagccgtgttcctacggtttctggcaggacttccggtcgttgtgctggttcttgtaccggctcggaatgagaactgctgtctggaagatccactgctgtatgagaagaacgaaaaagaatcttttacactcagacattttccgaccgaacagaccggtatgcaggtgggaacggcggcatatcatgctgagcgggaactggatgatatcctgtatcaggaaaccggaatctaccgcaatcagcagtatgccagggcaaatgcggtaacgttgaaaaccatgtacgaggaaatctccattttgtgggatcaggaactgaaataccggccgaatttcagcgttacggaagatatggtaaatattccggtcatctttgcgaaggtatccggtgtgaaagacggaaaccggcaggaatactggaacagtatccgcaaattaattacggaagacacctatgttatccgggaagtgccgcatctccggtcgaccgatgagaatccggtcaagccgtatgtgacggaattttttaaaaacggcagacttttgaaagataagataaaatcgcacagggcatatccatatggatatctgagggaagaaatccagaaccacatactggataaattgcaattacttattgaa

SEQ ID NO: 899 - DNA, 678 bp, Roseburia inulinivorans
  misc_feature: SEQ ID N?2360397
atgccgcagtttgagtggaaagaggaagatatgagatatatgctgtgcttttttccgtggattggagcggtcattggtatctgcctatggttgtgggcggtgctttgtgaaaaagcgggaatcggtatgcttgcatttacaacaatcgggagtgtgattccgatacttattaccggcggttttcatgtggatggatttatggacaccatggatgcgtttcattcctaccagccgcgggaaaaaaaactggaaatactcaaagattcccatatcggtgcatttgcggttatcatgctggcggcatacggactgatttacctgggagcattttcagaaatcagggatatggatattttaaaaactgtatgtgccggttttgttctgtcgcgggcattaagcggaattgcagtagtgtcttttcctgctgcgaaagaagacggactgctttatctgtttgcaagcaatgcacagaagaaaatagtcagagtttccctgtttatacaggttattctgagtgttgtatgcatgctttatgagtcggttcccgcggggattgtcaccgtcctgacggcagcaggagtatttgcttattattattaccgctgcaaaaaagaactgggcggcataacgggagatacggcaggatattttgtagtactttgtgagggctgtatggta

SEQ ID NO: 900 - DNA, 645 bp, Unknown
  BMI gene
  misc_feature: SEQ ID N?2360552
atgatgcatttaagccgtttctgcgaggaaatcatcatctggaatacgaatgaataccgcttcgtggaaattgatgattcttacagcacaggaagttctattatgccacagaagaaaaacccggatattgcagagctgattcgtggcaagacaggtcgtgtctatggtgcattaatctccatcctgaccactatgaagggacttccgcttgcttataataaggatatgcaggaagataaggaacttacgttcgatgctatcgataccgtaaaaggatgtatttccttatttaccggaatgattaaaactatgaaattccgcaaagatgtgatggaaaacagtgcaaagaacggctttaccaatgctacggatgtggctgattatctggtaaataaaggtgttcctttccgtgatgcacatggcatcgtgggacagcttgtacttatgtgcattgataaaaatatcgcccttgatgatcttcccttagaagattacaagtccataagccctgtctttgaagaggatgtttatcctgccatcagcatgaaaacctgcgtggacaaacgtatgaccatcggtgctccaggtccggaagccatgaaaaaagtcatcgcaatcaacgagaaatatttagaggaaaattaa

SEQ ID NO: 901 - DNA, 480 bp, Bacteroides pectinophilus
  misc_feature: SEQ ID N?2360764
atgagattattattagcagaagacgaaaaggaattgtccaatgcactggtgacgattctgaagttaaagggatatgacgtggatgctgcttacgatggtgaaatggcacaggaaaggattttaagccagagttatgacggactgatccttgacattatgatgccgaaaaaaagcggactggaagtactgcaggagatccgggaacgcaagatattgacaccggtgctgttactgaccgcacgtgctgaggtggaggaccgtgtagaaggcctgaatctgggagcagatgactatcttgccaaaccatttgtcatggcagagctgctggcaagagtcaatgcactggttcgcagaggaggggaatattccgtacagacctataatgtgggaaatacgattctgaaagcggatggaatggaattatccgtggatggcaattccctgcggcttgccggaaaagaagtagatatgctgtccatg

SEQ ID NO: 902 - DNA, 492 bp, Unknown
  BMI gene
  misc_feature: SEQ ID N?2360905
catcactggtatttagattttaaattaaaagcagatgtgtcattacttggaataattgattcttcgagaatgacaaacctgttgaatacagcatttaaagatgaaaatgaatatgaaaatgcagatgtaattgtttatacaattaataatatgtgttatgtagaaacgccatatcaatgctatcgctgtgtaaccaatgccatgattaaaaaatatcaaaatgtattctctaaggaagaagaggaatttttgaaaatgtcatggaaagataaaaagcagctggcagaggatggaataaaaaactggaaagagtttgaagttttggagtggatgcgggacgaagatcatagcagaatggaaagcacagtcggaggtaatgatggaatagaaaaagtccgcggaaccggaccggatccatctatatccggatgtattgtgctggcaggaggtgcggcagcaatgctgataataaagaaaaaaacggaaaaatag

SEQ ID NO: 903 - DNA, 561 bp, Unknown
  BMI gene
  misc_feature: SEQ ID N?2361869
tgtccgcagaaatatgtaaccggagcattggcagagggtgaaatcgcagcacttgatatcgcagacaaatacaaggcaggagctgcaccggaaaaagagctttccggacaggctcagaaaatcatagaagaatatgagcagattctggaacgtgaaaatgccccatttacgattgaagagcttgaagaagcgatgcagaaggtaatggatgaatatgccgtcggaacctcagttaactaccagttcaatgagaaacagctggatctggcggatgaaaagatagataagcttatcgttctggcagaacaggcagcagcggaaaatatgcatgaactgatgtttgcctatgaacttaaggaacgtctggtagtctgtaaatccctcattgcccatctgaaatacagaaaagaaacaagatggcattccttcaatgaaaaccttgattatccaaatcaggacaaggcatattttaaatatgtcaattcaaagatggaaaacggacagatccggatgattttgagagatattgtaaaggaggacacatatgagcatacgaattaa

SEQ ID NO: 904 - DNA, 324 bp, Roseburia inulinivorans
  misc_feature: SEQ ID N?2363295
ttgaatacagcattaagaaactcgattactgcaaccggcaaagaagcacagtatgatgcctgtgccaaacgtttgctgggacagaagtacattctggcccacatcctgattaaaaccgtggaggaattccacggcatgcatccggaagacgttgttccactgattgagggcgaaccgctgatccgcaccgttccggtagaacccggactgaccaatgctgttttacggaaaaacggcacccggattgtcggattcaacaccgaagcttccgaacttcacgaaggtctgatccgttttgacattgttttctatgtccgcatgaaa

SEQ ID NO: 905 - DNA, 882 bp, Ruminococcus obeum
  misc_feature: SEQ ID N?2363624
atgggtggaagtatcggaagtaccattggaagaatccttcacttagatgagaaagacagaatcgtcctcgtcatgtgtggaatgagtgcggcattttccgcattgttcggaactcccatggcggccacgatatttgcaatggaagtagaaagtgtgggaatcatgtactatgccgctttgctgccatgtgccctgtccgccatcattgcgtccagatttgcagtcaatatgggaatcaatccggaaagcttcctgattcaggaagtaccggagtttaccgtacagaacagtctgaaagtcgttattcttgccattctgtgtgcttatctgagtgcctttttctgtgtcatgctgcatacggccaacagatatctcagggcatatttccggaatccgtatgtcagaatcgttgttgcggccgtttttgtcatcgcagtcaatcttctgctgcataccaccgattatatgggagccggcatcgatgtaatagaaagggcagtagagggagaagtaagaccggaggacttgcctctgaaaatgatacttacagcggtaacattgggtgcaggatttaaaggcggggagatcgtcccatccttttatatcggtgcaaccgccggctgtttcctcggatatatgcttggcctgtcaccgtcatttgcggcagcacttggcatgacggcggtattctgcggcgttaccaactgcccgatttcctccgtactgatagccttcgagttattcggttacagcggaaactgcttctatcttgtaaccgcggcgatagcatacctgctgtccggctattatgggttatacagcggtcagaaaatcgtctactccaaggcaaagacggagtatattaattttaagacgaagtag

SEQ ID NO: 906 - DNA, 1047 bp, Desulfitobacterium hafniense
  misc_feature: SEQ ID N?2363649
tactgggtattgcttgcttatgcggtattatgtctgggtgcgatgaattattttcatggtaaaaaggcattgcggatttttcacgtggcaatgacggtgttgtgtacccttaccataattctgaccatggtagaatttttctataagccgattgtaagtctgccgtttgcaaagtattttattacttcaaaggatttctatgcagtagtggaaaatctggacacttcaaaatattcggactttgtatcactgaccttctataatcccaattatttcggtgggttttgtatgctattatttccgttcgctttttatgaatatctgaatgcagataccatgaaacagagggcaggttatttcgtattatctgcgggaatgtttttttgtgaactttctgcaaaatcatccgcaccattttatctggtacttgcggagctggtgatattgatggttatgcatggcagacaggggacacgtctgataaagaagggagctgtctggatcggcatgacagtggttcttcttcttggactgaatcttgccggcggaggaaagctggtaaacatcggaaagagtgttctgctgaatcagagcagtgcaaatacgaatcagaacattttccggctgaccgatatcagtctggatggaaatcagatgactttatatggagagaaagaaagttttaccgtggtttcaaatgaccagagcatacattttctggataccggtggggaaagactggaatttgaacaggatgaggaaggcagaattacctttccggatgagcggtaccaggcggtttccctgctctatcagaccggattgctgaccttcgatctggggtatgacggagccgtggatttctatctggatgaggatgtgttttatggaattggccagcagggagaaaaactgacagaggtttccctgaaacacagattcggcacttcgttttatcctttctttaccggaagaggatatgtatggtgtctctccgcggcacttttgccggaaaccttcctttgtggaaaaggtccggggaatttc

SEQ ID NO: 907 - DNA, 168 bp, Eubacterium hallii
  misc_feature: SEQ ID N?2364118
ttatcggcaaaagatgaggatgaagcctattataatacagctatcaggataatagacaatatgttggataaacagactccgaatgtggacacgatatcttctgcgacctatacatccacaggaataaagaatgcagtcattgcagcattgaaacaggcggtgaaataa

SEQ ID NO: 908 - DNA, 492 bp, Unknown
  BMI gene
  misc_feature: SEQ ID N?2364714
gcggatatgtttgccggatggtttcagagcagtatttcctcttataataattttatttctgcactgattcaaggcaatttaaagcagatgaatatttatatgaatgaagtggcactggaaaccttcagcagttttgacactggaaatagaatttctcccaggacacaaccagaacgtttctatcacggatttgttctcggactccttgtcgagctcagagaagaatatcagttaaaatcaaaccgcgaaagcggctttggcagatacgatgtcatgctgattcctcatgataaagaaaaaaatgccatcattctggaatttaaagtttttgacaaggacgaagaatctgatttaaatgatacggcacaagcggctttaaaacaaattgatgacaggcaatatgacaccgaacttctttctcttggatttccaaaagacagaatccggcattatggctttgcatttaaaggcaaaaaagtactaattagataa

SEQ ID NO: 909 - DNA, 675 bp, Unknown
  BMI gene
  misc_feature: SEQ ID N?2368698
cgtatcatcaacgagccgaccgcagcttctctggcctacggcattgataaggaatccgaccagaagatcatggtttacgacctgggcggtggtacgttcgatgtttccatcatcgagatgggcgatggcgttactgaagttctggctaccaatggtgatacccacctgggcggcgatgacttcgaccagcgcatcatcgactggatggctgaggatttccagaaggaaaacaacatcgacctgcgcaaggataagatggctgcacagcgcttgaaggaagctgctgaaaaggcaaagatcgagctgtccagcgcaatgagcagccagatcaacctgcccttcatcactgccgatgctaccggccccaagcacttggatatgaccctgacccgcgcaaagttcaatgaactgaccgctgatctggttgaccgcaccatggcccctgtccgcaaggctctggctgatgcaggcctgaaggcttctgacctggctaaggtcctgatggtcggtggctccacccgtattcccgctgtctatgacgctgtcaagaaggaactgaactgcgagccgttcaagggcatcaaccccgatgaatgtgttgctgtcggcgcttccatccagggcggtgttctgcagggcgacgttaagggtctgctgttgctggatgttaccccg

SEQ ID NO: 910 - DNA, 816 bp, Clostridium acetobutylicum
  misc_feature: SEQ ID N?2371135
tacaagagcatttccctcggtcagagcaagtccagtatgatcaccaccatttccgaggtgcagtccacggtcgacaaggtggaatccacggtgggacgctttccaaagctgctccagaccgccatcggcaaggccaccgggcttatcaccggtcagagcggcggttatgtggtcattcataccaccgaggaaaacggacagccctatgagctgctcattctggatgcaccctctattgacgaagccgtgaatgtctggcggtggaatgtgggtggtctgggcttttcccataacggctacaacggtccctacgaaactgccatcacggcagacgggcagatcgttgcggacttcatcacttccggctcactggtggcgaacatcatcaaggccggtgtcatccagtcgcaggacggctcgtcctggtgggatttggagagcggcgaggtcgtgcttcgcgcctacgccaccagcaaggaggtcaccgaggtcagcgaccgcatcaccaccattgaggagcagaaaatgctccggctggtcattatctcgtccaacgggaacatcttcaaaaacggcaatgtgaaaacgctgctttccgccaaggtgtactcctgggacgaggacatcaccgacacgctggatgccaaccagtttatctggacaagggtgtcggaggatacagaggcggacaaggtctggaacgagcagcatttcggcggcgcaaaatccgtggtcatcaccggtgcggatgtcaaagtccgcgccactttttattgcgacctcatcgacaccacgaccaggcagagcctgttataa

SEQ ID NO: 911 - DNA, 108 bp, Unknown
  BMI gene
  misc_feature: SEQ ID N?2371698
aattatgcggtattgccttatgaaaatttttatgaaaacctcttgactctgacgctgcgtaatagagtacgctggaattgccgcaagggaaggagggaaaacccatga

SEQ ID NO: 912 - DNA, 195 bp, Unknown
  BMI gene
  misc_feature: SEQ ID N?2373903
atgtcgggtggtttttatgcatatgacaaaacgaaatccgtgattgcgtgtgtgacaatcgcggattttttctatattataatcaaacattcaaaaatgtttattgtagcacgtgagaaagcagatggtttaagtattttagaagttgttcctgatcttcatcaaaatcttccggcaaaagaaaccagctgtttt

SEQ ID NO: 913 - DNA, 492 bp, Clostridium bolteae
  misc_feature: SEQ ID N?2377078
ggtatggtaatgatgacgaatacggcatacgcaatgccaaatgtaacctggggagaattggcgcgcacaaatatgcagagtactgtgttgactaatggagaaaggacatcaacgaatataacggataatattaccagaggcaaagtgttttcgacaggaatgttggaaatcactaatcagcaggatggtacattacatatttccgtagatacatatgcacatgtagttgttgacaaaatatatcagacggtatttttagaggtatgggatgaaaagaaagaagattgggtaaatgttaatcactgggattttgtaaaaagtatagaagaagaaccgaggttatcatcctaccatgtaggtttcactgtatcaggctgtgaagtcaacaaatattaccgtgcacgggcaatgcatcttgttgagtggggagataacatggaaggaaaagccactcagactgatggcgtccttctcaccgaccacgaggtataa

SEQ ID NO: 914 - DNA, 1731 bp, Unknown
  BMI gene
  misc_feature: SEQ ID N?2388534
atgattactctacataaaggtcaatacctgtctgacgtaatgagtgagattccgtcaaactgcatactttccaaaagaatacccggctgtggtgctactactttggaacttgaaactcaaagaaattccattatcgtagtgcctaatgtacccgtcatcaaaagcaagtgcggcaaatacagcaatctgttaggcgtttatgaagatgtcacaacagataagattcgcaattatctgactaataacagactacataagataataaccactcccgaaagtttcggtaaggtgaaagcggcttgcagtagtattgacatctataaccatttcttcctgctgatggatgaatgccaccaattaattaaggatgtggattacagaacggacatagtgctgcccatgaatgactttttctgcttcaaaagcaaggcacttgtttccgccactcctatcggattcagtgacccaagatttaaagagtttgaaacagtggaagtaagtgccgattatgactacagacaagaaattacggctacacatacttataataccaacaaggcaataagtgaatatttaggcaatcatacagagggaacagtctgttttttcgtcaattctgtggtaatgatttactccataatgaaacagtttgacatattggaggattctaccgtttactgtgcgccaaaaagccgtttgaaactgaaaaatgaatactcctttgataatgcttataatgattggagtgcttatcccatgaagaaatacaacttcttcactggcagattctttacggcattcgacttggacttgccttatcagcccgatttggtaatggttacagacccttatatttccgaatataccatacttgacatagatacggactgcatacagatttgcggaagattccgtaatggcataaaatcggcaacacatatctatagggtgaatccccaaataataaccaaaggcagagaacagatagaatgggaaatttcagcacatgaatttgcctataacacaatacagactttatacaatagtgcggataacagagaaagcagattcgctttcggtgcagttcttgaaaccatgccattccgtaaattcctatattccgactttacaaagaactggtttgccatagacaatgagattaattccgtactggtgaacaacagataccaatcaagacaagaaataatgaattggtacaatgactgccatttcttcaatcccacatttgagaattgcgaatataatgagaatgacgagaaattaaagattgccaaggctgcacgctcggtaaaggacaaacacagaaaaatggtacaacttcttagtgaaatggaaactccctattcggaatacgccttagactatatcaatgatatgcggaagattgacccgttcattgtggaagcgtttgaaactttgggcaaagagaggatagaggaacttaactattccgaaaggaaaatcagagaggaaatgattctgacacaacgtaaggggaataaagttgtcagactggttaagaatatattcaaggttggcaataggtattccaatgagaaaatagttaatgaattaacgagaatattcgagatgttgaaaattcaccccgaagaaaatatagaacctaaagttatcagtctctattaccaagctatcccttgctgggttggtaaaaagagaggttatcaattaattagtgagatagtctga

SEQ ID NO: 915 - DNA, 177 bp, Unknown
  BMI gene
  misc_feature: SEQ ID N?2390702
atgcccaacaaattttataatttacttaacagaccaaaaagaaatcttatggctaaaaaagataacgaagaaattccattctcagcaagtccgagtgccggaaatagtgaaaaactgaaagcgctgcaagctgcaatggataagatagagaaaacttcggtaaaggctctatcatga

SEQ ID NO: 916 - DNA, 774 bp, Faecalibacterium prausnitzii
  misc_feature: SEQ ID N?2391272
gtgtggtacaatgaaacaggcttttcaggccagaaggaggaacgtatcatgagcattcttcgcacgatcgcgatgtttgtatatctgtttggctatatgatcgtccactacggtgtgctccgccgggccgagcgcgccctcgccgccggggacatggataccgtggagcagatcatcaaccagcatatcccgcactggagccggggcatcctgaaggtgaccggcgcacagctggtggtggaagggcaggagaacatcccaaaggacggcccctgcgtcttcgtgggcaaccaccgcagctactacgacatcccgctgcttctggtggcgctggatgcgccccacggcatcctggcgaaagaggagctggaaaagattcctctgctcaaccgctggatgaagctgctgggctgcgttttcgtcaagcgcgacgacatccgcgcgtccgtcaaggcgctgaacgatgccacggccatcgtggagagcggcaagagcttcgtcatcttccccgaaggcacccgctataagggcgaagagggcggcgcaggcgagttcaaggccggtgcgttccgcatcgccatcaagaccggtgccccggtggtgccggtggccatctccggtgcacggggcctgttcgaggcccacggcaaccgtgcgactcccggttccatccacatccgcatcctgccgcccatccggacggtcggcatgagcaaggcagagcagaaacagctgcccgaagccgtccgccagaccatcctcgcacagctttaa

SEQ ID NO: 917 - DNA, 1287 bp, Unknown
  BMI gene
  misc_feature: SEQ ID N?2416715
atggaaaatcaaaatgaattcagttcaatcagaatcggccttgcatctcccgaaaagatccgcgagtggtcttacggcgaggtaaccaagccggaaaccataaattacagaacactgaaaccggaaaaggacggcctttactgcgaaaagatcttcggccccacgaaagactgggaatgccactgcggaaagtacaaaagaatccgctataaaggcaagatctgcgagcgctgcggcgttgagatcacccgctcaaaagtaaggcgtgagcgtatgggtcatatagaacttgccgctcccgtttcccatatctggtatttcaagggtatcccgagccgtcttggccttgtgctggatatcagcccgcgttaccttgaaaaggtgctctattttgcgctttatatcgtaaccgatcccggcgataccccgctggagaagatgcagatcctcaatgaaaaagaatacgccgatatgcgtgagcgctatgaggatgattttgaggccggcatgggcgcggaggcaatcaaaaaactgcttcaggatatcgatgttttccagctgcgtgatgaactgaacgcagaacttgaaaacgctacggggcagaagagagtccgcctgcttaaaaggctggatgttgtggatgcattctgcaagagcggcaacaagctggaatggatgatcctggatgttatccccgttatccctccggatatccggccgatggttcagctggacggcggcagatttgccacttccgatctgaacgatctttacagaagagtaatcaacagaaacaaccgcctcaagagacttcttgagctcggcgcgccggatattattgtaagaaatgaaaagagaatgcttcaggaagcggtagacgcgctgatcgataacggccgccgcggcagaccggtaaccggcccaagcaaccgcccgctgaaatccctttccgatatgctgaaaggtaagcagggccgtttccgtaagaatcttctcggtaaacgtgttgactattccggccgttccgttatcgttgtagggccggaactgaaaatgcaccagtgcggcctgcccaaagaaatggcaatcgaactgttcaagccgttcgttatgaaacgccttgttgccacgggcgccgcgtccaatatcaaatccgcaaggaaaaaagtggaaagagcgcaggatcccgctgtgtgggatgcgcttgaagttgtcatcaaggatcacccggttatgcttaaccgcgctcccacgctgcaccgccttggtattcaggcgtttgagccg

SEQ ID NO: 918 - DNA, 2433 bp, Unknown
  BMI gene
  misc_feature: SEQ ID N?2417405
ttgatagcaaaagctcagcgtatagaaacactgttggagaagaactggaagtttacgaaaggtgaagtagcggaagccatgaagcctgaatttgatgatcgtaaatgggaaaccgtaaccgtacctcatgactgggccatcttcggtcctttcgatcgcagcaatgacttgcaggaagtagcggtaacgcagaacttcgaaaagaaggcttctgtcaagaccggacgtacaggtggactcccttacgtaggaataggttggtatcgtactacgttcgatgctcccgctaatcagcagacgacacttgtctttgatggtgcaatgagtgaagcccgtgtatacgtcaatgggcaagaagcatgtttctggccattcggatataattctttccattgcgatgtcaccggatttttgaataaagacggtaagaacaatatccttgccgtgcgtttggagaataaaccgcaatcttcccgttggtatcccggtgcagggctttatcgtaatgtgcgcgtagtgagtactgataaagtgcatgttccagtatggggtactcagctgactactcctcatgttgctgatgagtatgcctcggtacgtctgctgacgactattgctaatgatgaaggaaaagatatccgtatcgtaacagagattatctctcctgatgggaaagttgttgcgacgaaggataatacccgtaagattaatcatggtcaaccttttgaacaaaatttcttggtgaatgctccttgcttgtggtcgccggagacaccttatctatataaggctgtttccaaagtttatgccgatggcaagcaaacggacgaatatactactcgtttcggtatccgtagtatagaaatcattgctgacaaaggattcttcctgaatggtaagcaccgtaagttccagggggtatgtaatcatcacgatctcggtccgttaggggctgccatcaatgttgctgcattacgtcgccaactcacactgttgaaagatatgggttgcgatgccattcgtactgctcacaatatgcctgcgccggagttagtgcaactctgtgatgaaatgggtttcatgatgatggtggaacctttcgacgaatgggacattgccaaatgtgagaatggctatcaccgctatttcaacgagtgggcagaacgtgatatgataaatatgctgcatcagttccgcaacaatccttgtgtagtgatgtggagcatcggtaatgaagttcctacccaatgtagtcctgttggctataaagttgcttctttcttgcaggatatctgtcatcgtgaagatccgacacgtcctgttacttgcgggatggatcaggtttcttgtgttttgaagaatggttttgcagcaatgattgatgtacccggttttaattatcgtgcacaccgttatctggaagcttatgaactgctaccgcagaatatagtgcttggttccgaaacctcttctaccgttagttcccgtggcgtatataaattccctgtagagaaacgcggggatgcgaaatatgatgatcaccagtcttccggatatgacttggagcattgtgcctggtctaatgttcccgatgaggattttgctttagcagatgattatgactggactatcggtcaatttgtttggacaggattcgactatctgggtgagccttctccttatgatacggatgcatggccgagtcatagttcgctgtttggtatcatcgaccttgccagtctccctaaagaccgttactatctgtaccgtagtctttggaataagaatgtgaatacactccatgtacttcctcactggacatggccgggtagggaaggagagaatactcctgttttcgtttacacaaactatccgactgccgaacttttcgtcaatgggaaaagttacggtaaacagcataaactgacagccgaagaaagtaaagctattcaaagcaaagatgcgcttgctctccaacgtcgttaccgcttgatgtggatggatgttccttatgagccgggtgaagtgaaagtcgtagcttatgatgcttcaggtaaaatagcagaggagaaagtggtccgtactgctggtaaacctcatcatctggaagtggtagctgatcgtttgcaacttactgccgatggcaaagacttagcctatatcacagttcgcgtggttgataaagatggaaacctttgtccttcggacagtcgtcttgttaactttacggtgaaaggtgcgggtcattatcgtgctgctgctaatggagatgctacttcactcgatttgtttcacttgccgaagatgcctgctttcagcggtcagttgacggcaattgttcaaacggctgaacaacccggagaaatcgttttcgaggctaaggctaagggggtgaaatcaggtaaggttgtgctgaggtctgttacagagtaa

SEQ ID NO: 919 - DNA, 1425 bp, Bacteroides cellulosilyticus
  misc_feature: SEQ ID N?2417656
atgcaaagggataatttggacttcaaaaacatgagtgtgagtaagttgtttacaaaacaacttttccccacgttgctgggtatggtatcatccgcattgttcactgttgtcgacgggatattcgtaggacgcggaataggtagtgatgctattgccgcggtgaatattgcggcgcctatttttatgatagcggccgggttgggactgatgttcggtatgggcggaggaattcttgcttccattaatctgtctcgtggcaaattggtggtcgccaatatcaatgttacgcagtcaatcgttatgctgacgattgtcagtatcattatgggaatactgttgactgtgtttcccgaaactgtagtaaccttattaggggccgaagggcatctgacagaattgtcggcggagtatttgttttggttctccatatccattccgtccacggttttactggtggcgttgccgttcttcgtgcgtctgacgaaccctaactttgccatgtgggccatgctggcggccactgttgtcaatattgtactcgattatgtctttatctttatttttgagtggggattgttcggtgctgctatcgccactgacttgggagaactggtggggacacttttactcttgggttatctgcttcgtccgtccgtatccgttcggtttgcaaggttgaagatgagtatcaagagcattcgactgacactgaggaatacatggtatatgctgaaactgggtgtttcgtcctgtttaagcgaaataacgattgctgtcatgtccattgcaggcaattatgtgtttatgagccatctgggaacagatggagtagcagcttatagtattgtttgctatctgtttcctattattttcatggtgttcaatgctatggttcagtcggtacaacccattgtcagctacaattatggttgcggacagttattgcggtccaataaggcgttgcgtttatgcatcatttctgctgttgtgttcgctttgctgattagcggagtgtttgtctgtttctccggcgatatcgtttccttattcttgccggatcggacgagccatgcctggcagtatgcggttgccggtctgcctctgtttgctgtcgattacattttcttcgggatcaatgtaatcacaataggatactataccagtattgaacgtattaatctggcgatgaggcttacactgctgcgtggtatcttgccggtcttgttcttctttatactgcctgtatggttcggcgtgacgggaatctggcttgcggtggcggcgggagatattactacaacagtggttatcgtatttttgaatttgaaagataaaaatagcaagaaaggaacaagtaatgttgatgatcattttcgtgaggtaacgaaaatgatagaaatagggaagaggagtgtatcaaaataa

SEQ ID NO: 920 - DNA, 180 bp, Unknown
  BMI gene
  misc_feature: SEQ ID N?2419417
atgcacgaaagtacggaaaaaaagcaaatggggaataaagacagaacacaaattacgcaatttttcgtcttatataaggcaaccgacatagatctaaaaaagtgttggattaaaattcccaaagaagatctgttaaaaacacatcctctttgggaaaataaagaaatgagaggtatctag

SEQ ID NO: 921 - DNA, 1815 bp, Unknown
  BMI gene
  misc_feature: SEQ ID N?2419991
atgaaaaaagaaattaagttcagcttggtgttcagggacatgtggcagagtgccggaaaatatgtaccccgcgtagaccagttggtaaaggttgctccagctattgttgaaatgggctgttttgcccgcgtagaaaccaatggcggaggttttgaacaggtaaatttattgtttggtgaaaatcctaataaagctgtacgtgcatggacgaaaccgttccacgaagccggtatacaaactcacatgttggaccgcgcattgaatggtctgcgcatgagccccgtgcctgcggatgtacgtaggctgttttacaaagtgaagaaagtacaggggacagacatcacacgtacgttctgtggactgaatgatacccgtaacattattccttccatcacttacgctaaggaagccggaatgatttcacagtgttcgctctgtatcacccattcgcccatccatacagtagaatactatacggatatggcgttaacgctcatcaaggcaggtgccgatgaaatctgtatcaaggatatggcaggtatcggacgcccggtatcattgggtaagatcgtagcaaatatcaaggctgcacaccctgaaatccctattcagtatcatagtcatgcaggtcccggttttaatatggcaagcatcctcgaagtttgtgaggctggttgcgattatatcgacgtgggcatggaaccgttgtcatggggtacgggacatgctgacttgctgagcgtgcaggcaatgctgaaagatgcaggtttccaggttcctgaggtgaatatggaagcatacatgaaggtacgtgcattgattcaggaatttatggacgattttcttggtctgtacatcagtccgaagaaccgcttgatgaactccctgctgatcggtccgggacttccgggtggtatgatgggtagccttatggccgacctggagtccaatctggaatccatcaataaatataaggcaaaacgtaacttgccgtttatgacgcaggatcagttgcttatcaagctgtttaacgaagtagcttatgtatggccgcgtgtaggttatcctccgttggtaactccgttcagccagtacgttaagaatctggcgatgatgaacgtgattgccatggaaaaaggcaaggaacgttggggtatgattgctgatgatatctgggatatgttgttgggcaaggcaggtaaactgccgggtacgctggctcctgaactcgtggagaaagcggaacgtgaaggccgtaagttcttcaccggaaatccacaggataattatccggatgcgctcgacaagtatcgcaagatgatgaaagagaataaatgggatctgggagaagatgatgaagaactcttcgaatatgccatgcatccggcacaatacgaagcatacaagagtggcaaggcgaaagaagacttcctggcagacgtggaaaaacggaaggcggaacttaataagtccccgttggatgacgctaaaccgaagacgctaaccgtacaggtggatggacaggcttatcgcgtaacggtggcttatggtgatattgatctaccggcaaatgctactgcgaaagtggaagcccccgtaggcgaaggtcaggatgtgatcgctccgttggaaggtaagttcttcctgacgaagaatgcacaggaaactccggtgaaggtgggcgacaaggtgaagaaaggtgacttgctttgctacattgaagccatgaagacatacaatgccatccgtgccgactttgacggaacaattacggctatttgtgccactccggggggcactgtttcagaagatgat

SEQ ID NO: 922 - DNA, 1920 bp, Unknown
  BMI gene
  misc_feature: SEQ ID N?2422713
atgactgcgcagcctaactctcaactctccattctcaactctcaacttctcaaagagtactggggatatgataacttccggggcatacaggaagacatcatcaatagcattggcgaaggcaaagataccctggggctgatgcctacgggcggcggaaagtccatcacattccaggtgcctgcacttgccaaagaggggctttgcatagttattactcctctgatttctctgatgaaagaccaagtacagaacctgaaaaaaagaggaatcaaagcacttgccatctactccggaatgtccaggcaagagattatcgtcacgttggaaaactgtattttcggcaattataaattcctgtatatatcgcccgaacggttggatacggaaatcttccgcaccaagctacggaaaatgaacgttagcatgataaccgttgacgaaagccattgcatttcacaatggggatatgatttccgtcctgcctatttgaagatagccggaatacgtgatctcctacccggtgtccctgtgctggcactgactgcaaccgctactccggaagttgtgaaggacatccagatgcggctgtgcttccggcaggaaaatgttttccgcatgagttttgaacggaagaatcttgcctacatagtccgcaaaacagaaaataagaccggagaacttcttcacatcctacgccgtatgccgggtagtgccattatttacgtacgcaatcgtcggcgaaccaaagaaatcaccgaacttttaattaacgaagagattaccgccgacttctaccatgccggtctggatgatgccaccaaggatatacgtcagcatcgctggcagacaggagaaagtcgtgtaatggttgccaccaatgctttcggcatgggtatcgacaaacccgatgtacgtatcgtaatccacctcgatttgccggactctctcgaagcttatttccaggaagcaggacgtgcaggacgtgacggcaacaaagcgtatgccgtaatactctatgccaaatcggacaaagtcacccttcataaacgtatcccggacacctttccggagaaagactacatcaaacaggtatacgaacatctgcaatattattatcagatggcaatgggagacggtttgggatgtgtcagagagttcaatctggaagacttttgccggaagttcaaatacttccctgtacctgccgacagtgcattgaagattctgacgcaagcaggatatctggaatataccgacgaacaggacaatgcctcccgtctttacttcaccgtccgccgtgatgaactgtataaattacgcgaactgggagaggatatggacaaacttattcaaatcgttctgcgctcttacaccggagtattcacggattacacctttatcaacgagaattcacttgcggtacgtagcggattaacgcgacaacgggtgtacgacttgctgatacgtctatccaagatgcgtgtcatcgactatattccacataaaaagacaccttatatcatatacacacgcgaacgcgtagacaggcaacatctgcaaatctcccgcagcatatacgaggagcgtaaggagcgttatgaagcccgcattcaggcaatggtagattatgtaacgaccgaaaccgtttgccgcagccgtatgcttctacgctatttcggagagaagaatgagcataactgcggaatatgcgatgtctgcctcagccaccgtgccgagactcccgggctttcctcccaacaaataaaagaagaaattaaagaattgcttcgcaagcaacctctgacacctgccgatattgcctcacaaatagaagcagataaagaaattatctctcaatgcatccgcgaattgctggaagatgaagatctgaaggcggagaacggcataataagtctgaag

SEQ ID NO: 923 - DNA, 774 bp, Bacteroides capillosus
  misc_feature: SEQ ID N?2429063
atgcagccaataatcagggcagaggacctgcactacacctaccccggcgacgagatcgagaccctccacgggctggatctcgagatagccgagggcagcttcgtcgccgtgctggggcacaacggctccggcaagtcgacgctcgcaaagctcatgaacgccatactcctgcccacctccggcaaggtgtatgtggacggcatagacaccgccgacgaggcgcggctgctcgacgtgcgccgcacggtgggcatggtgttccagaacccggacaaccagatagtcgcgaacgtcgtggaggacgacgtggccttcgcgcccgagaacctcggcgtgccgagcgaggagatacgccgccgcgtggacgaggcgctccgcaccgtcggcatgtacgaataccgcctccacgtcccgcacctgctctcgggcgggcagaagcagcgcgtcgccatagcgggcgtgctggccatgcagccgcgctgcgtcgtgctcgatgagccgaccgccatgctcgaccccgtgggccggcgcgaggtcgtctccaccgtcacgcggctctgccgcgaaaagggcatgaccgtcgtcctcatcacccaccacatgtccgaatgcgtgggcgcggacaggctcatcgtcatgtccgagggccgcatcgtcgccgacggcacgccgcgggaggtcttttcccaggtggagctgctccgcagcgagggcctcgccgtccccgccaccacgcagctcatctacgagctgcggcgcgacggctacgacctg

SEQ ID NO: 924 - DNA, 1812 bp, Unknown
  BMI gene
  misc_feature: SEQ ID N?2437460
atggacacaatcaatgaaataaccgccacttaccagcacattgctgaagaaggacgttcggagctaaataaagtacaaaacaagatttaccgcataggctcactgcgattattgctatttgttgcaggaattgcgggagttatatatttctggtcttcaggctggatagtattaacggggatcattgctgttacacttctgccttttatcctgttgataaagtatcataaccggctgtttcaccgaaaagattatctggaaaaaaagattgcaatcaatgagcaagaactttcagcgctgaattatgacacatcctcttttgaagatggagcagaatttatcgatccggcacacctgtacagttatgacctggatgtatttggtccacattccctttttcagtatataaaccgcacctgcacacaacttggaaagagtttgttagccaattggctgggcacgcatctggaaaataagaaagaaatagaatcccgacaggaagccatccgcgaactggcaccggaattgaacttccgacaagaattccgtattctgggactgctctataaaggaaaagctgctgatgaagatgaattaaaggcatgggctaagagtcccagtgtcttccgaaaaaatattttcttccgcatgctaccgctattggcaggcggaataaatatcttatgtatagcattggctatcgcaggcattattccgctcactgttttcggtattctatggttatgctttgtttttgccagtttctgcttcaccggtaaaattaccaaaatgcaggctgtctatggtaagaagctacaaatattggcaacgtatgccaacctgctccggcttatggaaaaccaacccatgaaaagtccgatattgaaggaagtgagagagtggatcggtgatgggaagcaaacagcctctcactctatccagcgtctaagcaagcttatgaacgaactcgatcagcgaaacaacgcctacatatatgccaccctcaacggattatttttctgggaaatccgtcaaatcatacgcatcgaaggctggaaagagcaatatgcttctgaactaccacgttggctgacagctattgcccacatggatgctctgtgttcactggccacattcgcttataatcatccggattattcctaccctactatcaccacccgctctttcagtctccgtgccacatctatgggacatccactgatgaaccgcgacaaatgtgtacacaatgacattgatatagaaaagcgtcctttcttcattattatcaccggagcaaatatggcaggtaaaagtacgtatcttcgtactgtaggcatcaattatctgctggcttgcatcggtactcccgtttgcgcccggagtatggaactgtatcctgttcagctcatcaccagtctgcgcaccagcgattccctgaatgataatgaatcctacttctttgcagaactgaaacgtctgaaacttatcatcgacaaactgcaagccggtgaagagctttttatcatccttgatgagattctaaaaggaaccaactccatggataaacagaaaggttcgcttgcccttatcaaacaattcatgactttacaggcaaatggcatcatcgctactcacgacctgatgctcggcacgcttgccgacatttatcctgatgacatccgtaattaccgattcgaagccgacatcgcaggtaatgaactgaccttttcttatcgtctgcgcgaaggagtagctcagaatatgaatgcctgtttcctgatgaaaaaaatggggatagccgttaccgactga

SEQ ID NO: 925 - DNA, 861 bp, Unknown
  BMI gene
  misc_feature: SEQ ID N?2440502
atgacacgcagggttggcatatcttggctcccaattcgttggggattattttttctgttcatttctggtttgcagttgctttctgcacaggaagatagtgcacgtttcactcttgatagcatgttgataaagccgaaagctgcatttcagcttccatccgtcaacctgcttcccgaaaagactgtatatcctttgattaatcctatacagttaggtgatttaccttctttctccttgaaagaggaactccgtatcccctatcatataaatccttctccactattccggggcgattatagtacgggaggcgtattaaggcaatttcctcatggggcggtattcggttccgggagtcagaccagtcttccgggcatcgggcgtttcaataatgcttcgttaggatatcagcatatctttaatgatcggctatcattgcaacttcgtgccaatgccatgaagataaatatgtctcacatcaccgggcaagccttcagtactgcgggcaggctgacttatcgtgcttccgaccgggttgccttcaatgtcttcggttcgtatgatatcggtaattcttacgggatgagcactaatagttatggtgctacgatgtctcttgatatgtccgaacgctttggtgtggaggtcggtgcccagcgttattacgatgccatgcgtggaggttggcagacggttcccgttgtgataccttattatcgctttgagaagtttaagctgggactggatgtaggcggaataatgtacgagattctgcgcaacgtggtgtttgataaacgcggcggcggtgactttggtggaggccctacgattagaccgccaaagttttcatttccgataaaatag

SEQ ID NO: 926 - DNA, 1029 bp, Unknown
  BMI gene
  misc_feature: SEQ ID N?2441401
atgaaacattccgttctttttgcctgcgtggttgttggtttgatttttgccggatgtcgtaaccggcaggaaccacctgtgccggtagttgtgcaggaggctgaacctaaagatacggctgtgctggaatttcctcatcctaaagagaaacagttgaccgctgccgatatttcccttaccaaagaattgctttatgaccagcataccctcgaagatacctatccatataaggatacggtacgctctttcaaatgggatgtcatccggaactgtctggcttatatcgagaatatgcagcgcgatactactgcaaggtgggtggtgttgcagaattataagaatctgaataaagaagctcccctggtacgtaagttcgtgcggaatgtgtatcgtcgtgtatctgatacattgggcgtggagcgctatcaatcggtgccgctgtatctgcccgctgatactttggtgcccgaacgttatggcagagacggtactatcgcttatctgaaaggcgaggagggaagtttttaccggatattacccgccacttttgaagaagaatggctggcaccacgcagttatctgaaacaattgccggatagtaccgtctttaatcatgtgatttttgtcgaccgcctggatcagaatattactaccttggaacatgtctcggaaggtgagtggaagatacgcagcatgaatcccgctactaccggaatgcatgctccaccctatgcccaggaaaccccattggggatgtatctgcttcaacagaaaaaaacgcgtatggtgttcctgaaagatggttcggcggagacaggaggctatgccccctatgccagtcgttttacgaacggagcttatattcacggagtgccggtgaatgcaccgcgtacaagtatgattgagtatagctggtcgttgggaaccactccacgttcgcacatgtgtgtgcgcaatgctacttcacattccaagttcgttttcgattgggcacctaccgaacgatctttggttgtggtgattgaatag

SEQ ID NO: 927 - DNA, 465 bp, Unknown
  BMI gene
  misc_feature: SEQ ID N?2448219
gtcaccttttacagccgcacgcggcagtgcctctggacgaaaggcgaaaccagcggcaaccggctcgacatcgtctcggtggcggccgactgcgaccgcgacacactgctgatccgcgccgttccccacggccccacctgccacacgggaacgcagagctgcttcggcgaggccgttcccgaaaccgaggggttcatccgccgcctgcaagccgtcgtccgccagcgccacgccgcgatgcccgaaggctcctacacggcgcggctcttcacgcacggcgtgaacaagatcgcccagaaggtcggcgaggaggccgtcgagacggtcatcgaggccgtcgccggcaaccgcgaggcgatgatctacgaagcctccgatctggtctaccacctgctcgtcctgctcgaagccacggggtgttcgatcgccgacctcgaacgggaactatcggcacgccacgcatag

SEQ ID NO: 928 - DNA, 1377 bp, Eubacterium siraeum
  misc_feature: SEQ ID N?2452621
atgtcagcagtaaaagaccttacaaaaggctcacctatgaagctcatactcggatttatgctccctatgctgttaggacttctctttcagcagttctacaatatggtcgatacgatagtcgtcggacagttcctcggcgtaaacgcacttgcaggtgtcggctcgacaggctcggtgaacttccttgttctcggcttctgcatgggcgtgtgcgcgggctttgcaatacccgttgcgcagaaattcggcgaaaaggattttgacgggctgcgtaagtttgtcggcaatacgatatggcttggcataggcttcgccgcagtgatgacaaccgctacctgccttctttgcggaaatatcctccattggatgaatacgcccgatacggtttttaaagaagcgtatgattatattttcgtgattttcttaggtatcccggtaacgttcctctataacattttatcgggctttatccgctcgctcggcgattcaaagtcacccgttgtcattctgataatttcaagtgttctgaatgtcggacttgacctgctgttcattctcgtgtttgatatgggcgttgccggtgcaggctgggctaccgtccttgcacagcttatatccggtattgcctgccttgtctacatgataaagcgctttgatattctgcacttatcgaggaaagatttaaaacccgacgcttattcaatgagcagactttgcgctatgggtgtgcctatgggacttcagtattccattaccgccatcggaagtatacttttacagtcggcggtaaattcgctcggtgaaacctatatggcggcggtaactgcgggaagcaaggtgacgcagttcctgtgctgtccgtttgacgcaatgggctctacaatggctacctactgcggtcagaatgtaggcgcgggaagagtcgaccgtatcgaaagcggcgttaagaaatgctcgatactcggcatagcctatgcgataatcgctcttatcgtgataataccgttcggcggcgaattttcaaagctgtttatagacggaacgcagacagaaatactggatcttgcaaagcagtttttgtggctcaacgtggtgttctatatcccgctcgcattcgtaaatattatacgcttttcgatacagggactgggcaacagccagctagccgtatttgcgggtgtatttgaaatgatagcaaggggcggcgtggcattgggacttgtgcccgctttcggttatgtagccgtatgccttgcaagcccggcggcgtgggtgcttgccgatctgttcctcttccccgcgttcttccattcggtgaagatactcaaaagacggtttcctgttaaaaatacgactgtaagtgataatgaggattga

SEQ ID NO: 929 - DNA, 354 bp, Eubacterium siraeum
  misc_feature: SEQ ID N?2453007
atgcttgtaaaaagaggagagatatactacgccgatcttagcccggtggtcggaagtgaacagggcggtatgcgccccgtacttattgtccagaacgatatcggcaaccgccacagtccgaccgtcattgccgccgccataacaagccagaaggacaaatcacggcttccgacccacatttcgataaatgccgaccgttgcggtcttgcaaaggattctatcgtactgctcgagcaggtaaggacgctcgacaagcagcggctcaaggagcgtatgggtgagcttgacgagggcgctatgaacaaggtagacagtgcactgtcggtaagcttcggtctttcgggaagcaattaa

SEQ ID NO: 930 - DNA, 441 bp, Eubacterium siraeum
  misc_feature: SEQ ID N?2453405
atgaaaataacaaaaatgacacccggaaattaccgcgatgtttatgaactgtggctgtcatgcaaaggcatgggacttaacaatctcgatgacagcgaacagggcataaatgcgtttctggagcgcaatccggacacctgctttacggctcacgaaggcgacaagctcgtaggcgttatattggcaggctcggacgggcgcagaggctatatttatcacactgcggtaaatccgcagtaccgcaaaagagggatagcgaccgcccttgtcgatgcggttatggacgctatgaaaaatatcgggataaataaggtcgcactcgtggttttcagacacaacgagagcggtaacgaattttgggaaaagctcggctttaccgaaagacacgatcttgtttacaggaataaagcgataaacgaaatgataaggaatgatacctga

SEQ ID NO: 931 - DNA, 1236 bp, Eubacterium siraeum
  misc_feature: SEQ ID N?2454577
atgagcagagttgtaattaccggtgtgggtgtagtaagccctataggaaacaccaaggaagaattctggaacagtcttatggagggtaagcacggcttcacactcgagcagtggtttcccggtcagagcgaagagcttaatgtaaaggcttctgtaaaggatttcagcgcagagggacttttcgacaagaaggaactgcgccgcacagatatcatcacacagtatgccgtgtatgcggccgataaggctataaaggacgcaggaagcgatttcaaggatctcgatccttacagatgcggcgttataatcgggtcgggtatcggcggtatggaaacaacgcaggaggagcttctcgcatatcacaacaagggcaacaagcgagtttccgtattcactatcccgaagatgataggcaatatggcggcaggtacggttgctatccgtacaggcttcaagggcgtaaactactgtacggtatctgcctgcgccagcggtacacacgctataggcgaggcattccatgctataaagaacggctatatggacgttgcgatagcgggcggtacggagaagtgctcgataggctttgcttatgcaggcttcaacaatatgcacgctataacaaagtcgaccgatgttgacagagcaagcattccttttgacgcagagagaagcggcttcgttctcggcgatggaagcggtatcgtaattcttgaagaatacgaacacgcaaaggcaagaggtgcaaacatctatgccgaggtcatcggttacggtgcgacctgcgacgcttatcacgaaacaagccccgaccccgagggcaagggcggtgcgaaggctatggagtttgcggtaaaggaatcaggcagagcgcccgaaaccttcaactatgtaaatgcacacggtacatcaacacctatgaacgataagaccgaaacagccgctgtaaagctggtgtttggcgaacacgcaaagaatatggtgataaactcgacaaagtcgatgacaggtcacctcttaggcgcggcaggcggcgttgaagctgtagcctgcgctcttcagataaagaacagcaaggtacaccgcacgttaggcttaaaggtggcagacccggaatgcgacctcgactatgctcctgagggtacgagagatatgaagataacgggtgcactcagcaactcgctcggcttcggcggtcataacgcttgtatagcatttgctcctgtagaggactga

SEQ ID NO: 932 - DNA, 1173 bp, Eubacterium siraeum
  misc_feature: SEQ ID N?2454584
atgtacatttataacgcaactgtcatcacaatggcggagaaaaaccacgaaaacggatttatccttatagaaaacgataaaataaaggctgtcggcgatatgtcgcagttaaaggacttttcaccgtcagacagcgacatagacgcaaaaggcaaaacagtctatcccggctttatagatgcccactcgcatataggcgcgtgggaggacgggcttgcattcgagggcgatgacggaaacgaggacaccgacccatcgaccccgaaccttcgtgcgacagatatgataaatccgctcgaccactgctttgaagaagcggcgcaggcaggcgttacctcggtggtatgcggaatgggaagtgcaaatcccataggcggcacattccttgccatgaagaccgcaggctcaaaaagaattgataaacggataataaaagatcccgttgcggtaaaattcgcactcggcgaaaacccgaaaaacgtatacaaggataaggataccgctcccgttacccgtatggctaccgccgcaataatccgcgaacagctctacaaggcaaagcgctatcttgatgatatgatagactatgaaagctcggtaggtacggacgatgagggcgaccgccccgagtatgacgcaaagtgcgaagcgctcatgccgcttttaaagcacgagatacccgcacacttccacgcccacagagcagacgacatattcacggcgataagacttgccaaggagtttgacatagattatgtcattatccacgcgacagagggacaccttatagcagatgagcttcttgaggacaaagcacgcacgatagtaggacctataatcagcgagcgatgtaagcccgaacttcgtaatcatacgatagcaacggcaggcgtactgaataaggcaggcgtaccgatctgcatctgcaccgaccaccccgttgtacccgagcagtatcttccgctttcggcaggacttgctgtaagaggcggtcttgacagggaagaagcgctgaaatcaataacgatataccccgcacagatagcaggcatagccgacagagtcggcagcatcgagccgggcaaggatgccgacatagttatcttttcgggcgatccgctgtcaatatgcgatacgcccgacatggtgatcgtaaacggcaaagtaatataa

SEQ ID NO: 933 - DNA, 507 bp, Eubacterium siraeum
  misc_feature: SEQ ID N?2454587
atggaactgaatattgtactcgttgagccgcagataccgcagaacacaggcaacatcgcccgcacctgcgcggtgacaggcgcaagactgcatatagtaaagcctatgggctttcagatagatgataaaaagctgaagcacgcaggtcttgactactggcattatctcgacataacctattatgacgggcttgacgacttttttgaaaagaataaggacggtgaatttttctatttcaccaccaagggcagaaacacctactgcgatgcgcagtataaggataaaacttatatagtgttcggcagagaggataagggacttcccgaggatctgttatttcacaataaacagcactgtgtgcgtatacctatgggcagtaatatgagaagtctcaacttatcaaacagcgtagcgataggcgcatacgaggtactgcggcagtgggatttccccgagcttcagaattacggctcgcttacaaaatacgactggagcaaagccgaataa

SEQ ID NO: 934 - DNA, 2433 bp, Eubacterium siraeum
  misc_feature: SEQ ID N?2454614
atgaaatggagggactcggttatgacagctcagaactcgataagtaaaaagagctacttcggcagctatttcagatacaagctgttcaaaaacaaaaatctgcttattctttctttgatattcagcatactcggtataccgacatttgctgtctgcgtttctgtttgtaccggaatactcaacgattttataaatgcaggtgtattcaatttggataatatacaggaaactctgggcactgttgatacgattttgatgtccggtgtcatagtatcggtcgtgtcggtcgtgatatttctgataatgccatttgtggtatcaaacgtcatattcggctacaatcttaaaaagtgtgacgcagatatgattttaccgcttccgctcggtactacccaaagattttttgccgacctgctttcgggttctgtcatatgcattcttcccacactgctgacaggtgcggtaagcgcagtggtaacctctgcaagtaaaatcgcgctatcggacaagataacgcaaatatataacaacggtaactgcactgcggatatagatgcgttttatcgtgcgacaaatttgatagtgtataaggatattgccggtgtagtgctttatttgctgatctcaattgttattgttcaggcgcttatgtatgctttctgcgtgatgataaacgcctgcgccggtagaacggctgacagcattatctattccgtactcggtatggtggtattgtcaatggctgttgtttcgtttgcccgcataatcatgggcagactgaccagtgtttcaaacgatgaacagattttttcactggcaatgtatgccgcaccgctcggtcctgttttttcgttcatcggttctttcttcaactcatataagtatgttgaatatcagatggagggaacgttgtggcagagcgatatgttctcggtgttcagtgtgcgcaatataacggtacttgcagtactgttcttaatttatctcggtcttgcttatcttgcaacaaggctgagaaaagctgaaaagacaggctcgccgttcgtgtttgaactgccgtatcatataataacactgggtcttgttgtgactgtttttgcaaatataacaggaacaacaggcttgcatgaaaataacataacggcatatgtagcctgccttgtaataagcattgttctgtatcttctggcggaattgacgcacggcagaaaaatacgcaagctgtggcagtcgtttgtaagatacggctgtgcggttgcaggctcgttactgctgtgctttgttatgaggtcgtatgacattttcggacttgaacactatgtaccgtctacgttttttgtagacaacgtaagcgtttcaacgtcaaaggctttcaatgaattttgcggcggcggtatagtcaacaacggatttcaggagtttgacgatgaaagatcgatcaaagcgataaccgattatcattcattcatagtcaataacggctatgcgcgtgcaggcggcaacggggtcgttcattacatcagtacgccggacgatcaatataccgactatactactgtgagctttaaatatcgcctcaaagacggaagcgttgtgacgagaacatttaatgtcaatatccaaaaggataagagcgcagaatatgcgaaaaagctgtacgatatgagatgcgccatgtccgaaagtgacggatatcagtcattttttgagtatttcagaagcgcaggaaacggttgggatattatttcccaccgcgatgacggtgagctgtacggaagaaagcttaaaacggagcttaacgaaaagctgattaaggcactgaaaaatgatatgaaagcgggcagaaacacaggaaagctcgctgctgtgctcgactttgtccgcgctgatgcaacttattcctcaatgagcgttgagatcagagagaactgcaaggaatcgcttgccatattggaaaacaaggataattcgacatcgcgcagggaaaaaataatcggtgctttaaggactgctaagtacgaatatgacaatacggaagcaggcacagagtccggcagcgacgaatacaacacaagcgtaggagtggaaaccgactacaatatatataaaattgaaaaaatactctcgccataccaggtttcttacagctcggattgggtatatgccatcaatgcagagatggccgctgttccatacggtcttgcagacagcgaagcggtgactgaatttgaaaagctgtgcaaaatgtatgacttctacacggacggagtgctttccgataagaaatatgtgatgaccgaaccgtctatgaacgctttcggaggagcaatatattatatacccgatgaaaacgtgagccgtgcagaaaagctttataaaacgataatcggcgaatatcaggacagtaccgtacaaagccctgataacgaatga

SEQ ID NO: 935 - DNA, 1620 bp, Eubacterium siraeum
  misc_feature: SEQ ID N?2454620
atgccggactaccgtcgccagatagagctgataacaaatcatcttatagaaagacacggcataagaaagctgaattttctgggaggattcaagaaccactttaccagtgacgaacgtcttgagggcttccttgatgcactcaaaagccacaacataccgatagagccgtcaagaatatattacggcaatctgtggagcgcccctgcaattcagcaggtggaaaagatgaacgaggacggcaaccttgactgcggagcaattgtgtgtgcaaacgatacaatggcatcggccgttatgataaagctgtctgagctaggctttgatatgccgggcgaaattgccgtcaccggaatggacggtacagacgaggccaacggatatattacgaccgcaaagatactcgccgacaaagccggcgaggaggccgccaatatcgtggctaatcttcttctcagaggcaagaagcctgcaaagctcggcataactccgcccaacataatttacggtatatcctgccgctgtacgaatatgcagaacgccctcgatctcctgccgaagcaaagacacgatctgttcgaagaactatatgacgcaaggcgtttttcgataagaacggcggctattgcgcaggagcttgcaaactgctctacatttgacgatgcaagcaggagtatttcggcgacgctttcgagaatatggtgcagcaattcctgtatatgtatctgcaaggactttatggaaagttcgcttgtaaacgattcaatcgacgatatcgaagacaactgtcccgtacacagacacggctactgcgatactatgaagtgcatagcaagatacgcagataaaaagccgcagagcgaaaccgaatttcccacttctgaaatgctccccgacttctacgaaatgtccgacaaaagcaaggtcattttgtacacgcctattcacataagggataacacactgggataccttgcgttcaatttctatccgtggagcagcatgaactatttgctgaactatctcactatggctatatcacagttgctggagtcggtacgcagacaaaatgaactgtacgcttatgcaaagaagatagatatgctgtatgttacagacccgctcacctcgctgtacaaccgcagaggctttttcagaacgtataacgattatgccgagggcggagttaaggatgactgcatggtcatttcggtggatcttgacaatctgaagctgataaacgacaacttcggacacaacgagggcgacaacgctattctcactatggcaaatgcacttaagtccgccgcagacgagaacgatatatgcgcacgcttcggcggcgatgaatatgtagtattcggcaagggaaaaggcgaatatgaaatgacggcgtatatcgataaagtcaacgaatatcttgacaaatacaatctttcaagcaataagccctataatgtgcacggaagtttcggcggctgtataatgcccaaaggtacaaaaatgcacatcgactactatataaatgccgcagattctaagatgtatgtcaacaaggaaactcacaagaggaccagaatgctctattcgtacaacaaagacgatcgtgagagtgagaaataa

SEQ ID NO: 936 - DNA, 966 bp, Eubacterium siraeum
  misc_feature: SEQ ID N?2455947
atggcatatgaaaagctgatcggcacatttgaatcatctgacggtattgacaattgtgcctattatatttacttgcctacatctattataaacggcggttataagggtattatccagatttcacacggtatgtgcgaatatattgagcgttatgaacattttgcggattttcttacatcacacggttatatagtctgcggtaacgatcatctcggacatggaaacagtgtaaaatctaatgacgacctcggttactttgcgaaaaaagacggctggagccaccttgttaacgatcttcaccgtatgaccatgataatgaaaaagaagtatcctgctctcccttatattctgataggtcacagtatgggaagctttatcgcaaggctttatctgacacgctttccgaatgagctcacctgtgcggttattatgggtacaggcgatgataagtcgctttccgatatcggtgtaagagcgacccgctctgtagtgtccatcaagggtgaacgtttccgcagcgataagctcaacactctcatattcggagtgtataacgataaaataaaagacagacaaactatctttgactggctcactcacgacagagaagtaataaaaaaatatatagatgacgaaaaaagcaattttgtcttcaccgcaagcggctttgttgaccttaccactcttcttcgcaaggtgtcaagtcagcgatgggctgaaaaagtgccgaaaaaactacctgttatatttatggcaggaacagcagatcctgtcggcggatacggcaagggcgttagaaacgtatatgcaaagctgatagatgaaggctgtaacgtggatataaagctctaccccggcgcacgtcacgagcttgtgaacgaaactatgaaagaaatagtttttgatgatattttaaactggataaacagaaaggtcggcggaatgacaggcaattatgaattttga

SEQ ID NO: 937 - DNA, 1704 bp, Eubacterium siraeum
  misc_feature: SEQ ID N?2455952
atggcatacgataattccaatgtaaaaccaccgatagttgacctgctgtacccgagcgaggaacagcgcagagcctgccttaaacgaaaggctcagcttgaacagctccctacagagttcgagaaagacctgatgttagcacagctgtcggaacagctcacaccgcataatcaatacaaaatgaccgctattctcggtgagctttgcaatgaccccgctgtcgccgagtaccgtcttgatataatagatgatcttctggctgatgcctcccttacagcaaccttgcgcaaggtagtcaataaaatgcttataaacgacaggacgaatatctacaagctgacaactccggacagctttacagtacttgacacggcgctcactgcttttgagtcatactgtgagtgtatggaaatacttcacgagttgtatgccaaaaagtccggcaacataagatcgaaagggcttaaaaagctgtttgacttctttgagggacactacaacagtaagcactataagaagctgaaagccgaatcggaagaactgcgcagtgcaatgacaggtaagatacgcagtgcgactattggtataaattttgatgaaaaccttgttccgatatcgatgggtcttgtcggcttttcggataaacggtatgagggaaacggcacggttatcgacagaatattaagcttcggttcaaaggacaacgagcataaggtcatgcgcgatctgcatgagcgttttgacgatcctcaatccgcaaagcgcgaagaaatagtaaacaatctcgacagagcattgtttgccgagcttgacaaggtgacaaagaaatatgttaattcgatcgatgatatccttaatgaataccgcgcgataggctttgaggatatgtacgctattgaatatcagcttgacttctacagcggagctgttatgatgatagaaaatgtgcgttcaaagggacttgaaatgtgccgtccgaaatatctccccgctgctgaaagaagagccgatataaaaggtcttttcgacccgatatatttcaaggaggctaacgtctggaacttatccaacaagccgcaaaagcaagtcgtaacaaacgatataacctttgatagcaatgccggcttctacatacttacaggtgcgaacaacggcggcaaaacgaccttcgtccgtgcggtcggaatatgtcaggtcatggctcaggcggggctttacgttcccgcaagcagctgtgagatatcgcttgttgactgcatatacacacattttccgaaagaagaacaggtcggtatagatgcgagccgtttcactacagaggtaaaagaatttaagactataagcgactgcataactaaccacagcctgcttttgatgaatgagtcgatacagagtaccacaccgcaggaatgtacagatatagccgcacagcttatgcgtatcttttgcattatcggcgcaagaggtgtatttgcaactcaccttacaccgcttgctaaaacagcgcttgagcttaattccgaccctaagctgaacacaaggaccgaaagcataatcgtaactgttgatgaagcaacaggcgaacgcagatacaaaataaggaaaggtctgcccggcgctaacagctatgccgcaacgatatttgagaagtacggacttgatatcaaggctcttgagaaaaaggcagagaagatgaacagctga

SEQ ID NO: 938 - DNA, 285 bp, Eubacterium siraeum
  misc_feature: SEQ ID N?2455617
atgtccaagcgtaatttaggaaagcaagccgcggcggcgctcaaatacaaccccgaccttaactatgccccggtcgtggtagcgtcgggtcttggcgagcttgcaaagaagattataaatatcgcagatgagaacggcgttcccgtttaccgtgacgacagcacggcggcgctccttgtaatgctcaacagcggcgaagcgatccctgttgaactgtacagaataatcgcggctatctatgcggaggtagtatattccgctaatgatatgaaaaaaggcaaataa

SEQ ID NO: 939 - DNA, 3666 bp, Eubacterium siraeum
  misc_feature: SEQ ID N?2455618
atgaaaagaacattttcaaccagaatcatagccggcatagcaacatctgccgtgcttgcagtcggctcgctgtcctttatggcaataaacgcaattgccgatgaagcggtgagttattacggactgtctgcagacggtactgttgtaagcggaacggtaactgattatacaaagatagcttcaactgataccgcatggggcattgccggcaaagaaacgtggtatgtggctgacggtaacattggtatcggtacaacaaatcctctggatctcaaaggaaatgtaaatgtcatactcaagaacggtgcagagatatttgtatggaacggtattgccggcgcagatgcaacaataaccttttatagtgaaaccgaaaacggcggcggaataatgacaatcagaggtatagacggtcaggacggtcaggccggcgggactgaaagcatgggcgaaacgggaacgggcaaaagcggcgataacggtagcagtgctgttgattgcggtagcttagttatttccggaggacagatcaatgtgattggtggcagtggcggtaacggcggtaacggcggctattatactgccaacagtttctttggcaacggcggtaatggcggtaacggcggtgcggctataaccgataatacaaaggtgtatcttaatggcggcagacttaacgttacagccggcagaggtggagatgcgggcgtaaatacgtacgcacccgatgcagaacgtgataattataatggcaagccgggaaatcacggaacatcggtaagcggaatatatgccgtaaacggtactctcaatgtcaataaacttgatgattccgatgccgccgatacttctggcgattttaagcttctgtctgtgaacggttacgaaaatgcaaagctcgatataatcggtcacggaacggcgaaggtagcggacggcactgttattaaaacctacggcgatatttccgtagcgggtactctgcttgtcgataacggtactatactcacaaacggcagtattacaaaagacagtacggcacagataaaaaagacgaacggcggcgttatccgcaggttcacacctgcttccggtgccggatatacgctggattatgcaagcggtaagtgcattgcggaaaccggctataaaataaagctgtcggacggaaatactttaaccgatgttgccgatgccgacacaatagtatcggaatcaaacagacttagtattgtccacatcggtgacagtgaaataatagatgacagcgagccgcaagtaaatgtaatgccctattgcataaaggcaaataatacgaatgaaacaaccgtaacggacggaaatgtctttgctacgagaggagctccttcaaggtttacgtttgctctgaacgatccggatgaataccgtttctcaggcgttaaggtaacagatattgacggtaatgcgatacctgacaatatgtacacgtttgacagcacgacaggcgagttcatcgcactttcggttgaccgcaaccttatcgtaactacagacgcaagtcttaaagatgttgaaatatctgtaacagacagtgaaaacaatcctgtgtcaactgtcgacttcggtacacattttgataacgacaacccgacaaagacagtaacgctcaaggtgaaagtcacagagggcggttctatagcaaagtacagagtagtaaaggaatccgaccttaataaagcaagcggtgtcataactgatacttcttcgttcacagtatcatacactgccggcaatgaatggggtactgccgatgacggctcttcaaagattgcaaagggtgaaactgcaacattcacagttaagcccgacagcaatttagccgcaggaacttataccgaagattttatcgttataacagacagaaccgcttatgcggatgcgtcggcaggcactcaggataatgctctggcacgtttcacgctgacttataaggttgaacacgagagtgacggcaatctgcattattccgatctaaccggacactataatctttgtaagaactgtcaggcaaaaatcaataaagtaaatcatacatttgacatcagaactgtaaacgaaaacacgttagctgctcctgcggattgtgtaaatcctgccaagtatttctattcgtgcgaatgcggcgcgcacacaaatgacacgacgctggtgtttgaaaacggcgatccgaacggtcacacatttggggagtgggaagcagatatacctgcaggatgccttacatcgggcagagataaacgcaagtgttctgtgtgcgaatatgaagaaacacgcgaaatcgagccgacaggtcatatatgggaagacgactttacgattgacattaagcccggttgtaccgaaaagggatcaaagtctgtgcattgctcaaaatgtgatgagaaaaaggacattaccgaggtacccgcaaatggtcattcgttcggtgaatggacaatactcaatatgacagactgtacacagggcggcgtacagcaacatatatgtacagaatgtggctttacggagatctctgacattccgcctcaggaacatgtatgggatgatgactttacggtcgatttagcaccgacttgtacgcagagtggctcaaagtcgatccattgctcaagctgtgaagctgtaaaggatatcactgagatcgagccgatagatcatgtattcacggaatggtcggtaagttctgatgctacctgcgttgaaaaaggacaaaaaacaaggtcgtgcacagaatgcggttacactgaatatgatagtaccgatatcgatttaaatgcacatttatgggaagatgatttcacggtagacaaagaaccgacctgtacagctgacggttcaagatctatccattgctcacggtgcaacgcaactaaagattcagaacctataccggctacagctcatcagtacggcgagtggaaagtagtcaaaaaagctacctgcacagagaacggcaagcgtgtgcgtgaatgtgcaaactgcggaaaaaatgaagaagatatcattccatcggctcatatatgggataaaaagataactgttgataaagaaccgacctgtaccgaagacggttcgcagtcgatacattgcactcagtgcaatgcgcaaaaagatatacagaagctttctgcgaaaggacacgactggtcggaatggaagataacaaagaagccgacaacagttgaaaagggtgtcgaagagcggctttgtcaggtgtgcggagttgttgaaaaaaatgagcttgatcttatcagagataacacttccgatagttccgacagcaagcctgaaaccccggacagcaagcccgaaaccccgggttcggatatcactgagtggcattgtgatggcagtcaccactggcatattgatttaaacggaaaccgaattgattatgcatatcatgagtttgtatggataacagataccgaaccgacaggcacacagcccggaataggtcactatgtctgcattgcttgtgattataccacatcgcccgaggagtttggcaaggacagccccgaaacgggtagcgaatcgctcgcactgtggatagcggctgcatttgtcgcaggcggtgttgcaccgatagctcttaagataaaaagcaagaagagcaagtaa

SEQ ID NO: 940 - DNA, 1629 bp, Eubacterium siraeum
  misc_feature: SEQ ID N?2456780
atgaaggacaagctttccgcattctggaacggttttaaaaacaaatggaactcgctcgcgaaaaatctgcggatattcataataacggcagtatcggtagtcgtagttgccgcgatcgtacttgcgatagtacttaaccagaaaggctacacggctatttatacgggacttgacagcgaagagagctcgcaggtcgtttctgctataaatgagttggggataacagatgtcaagatggggacggacggcagtatttctgtgccgagcgatcaggcggataatgtaagaatgcagctgagtattcagggttatcctaagtcaacgttcaactttgacgtatggaacaacgggataggtatatggtcgaccgataccgaaaaaaaggtactccagatacagcagttgcagacgcaccttatgaaggcgataaataccataagcgcggtcaagaactcatatgttataataacaatgcccgagaacaacaactatgttatctcgacagacagtgaagacccgagagtcagcgtaaagcttgacctgaagaaggacgcacagcttacaagcgatcaggtagagggcatttatgcattggtactcaattccctgccgggacttgagcgtgacaatatctcgatacttgatacggacggcaagcttctgacaggcgaaaatacaacggtcgaagaggacgtactgtatcagtcaaggctgaacttccaggagcagatgcagaacctgctgaaaagtcagctcaacgacacactgaaaaagctgtacaaggactatacgataaacgtaaacgtaacgctgaattacgataattcaaagtcggaatatacaatctacactccgtcgatcgccgaggacggcacatcgggcggtatgatagagagctccaccaagaatgagggctggggcggtataggttcactgtcgggcgtggtcggcactacaagaaacagcgatatttcaccgaactaccctaccatcaagggtgacggtgacaacgaatattactatcagaacagcattaccgtaaaacgtcttgtaaacactgagataagacagctcgaaaagaacggctactcggtcgataagataactgcggctgtgacagtcgatcaggtgaatatgcttgaggctgacaaggaacagctccgtcaggtgatagcattcgcgatcggcgcagatgtagcgaatgtaacggtagctaattatccgttcgttataaacggcaacaacggcgctaacggtaacggcaataccataaacagaggcggaaacgttgactggacggtatatattataatcctgctgggacttcttgtagtggcgcttcttatcgtagctatactcacaagcaatgcaaagaagaaaaagcgggcaagagcaaaagcaaaagcaattgccgcacaggcagccgcggcacaggcggcgcaggaatctgcggcactcagctttgagcctcagtctcagcccgatgaagaattcaatatacagcaccttgacgattatgacgatgagtcaaagagtgcggtactcaagaaagagatcaaggaattctcacacacaaatcccgatgttgttgcacagctcatacgttctatgatgagaagcggcaactga

SEQ ID NO: 941 - DNA, 1305 bp, Eubacterium siraeum
  misc_feature: SEQ ID N?2456782
atggatctcggcggatttctgacagaactcaggactaccgatacatataagtatctgggtaaaattgaaaagatagtcggaatgacgattgaggcaagcggtccgctttgcagcataggcgatgtatgtcgtatctatacaaaggatatgaagtcgcatatccctgcggaggtggtcggttttaatgagcacaaagtgcttcttatgccctacaccgaccttgagggtataggtccgggcagtatagtggacaatacaggcgataagctgaatgtaagggtcggcgataagcttgtaggaagaataatagatgcactgggaaatccgcttgacggcggtgaccctgtggaatatacagatgcagtacctatagcgggcataccggtaaaccctctcacccgaccaaagatacacgagccgatagagcttggcgtaaaggcgatcgacgggcttcttacaatgggtaagggtcagagaatgggtatctttgcgggctcaggtgtcggcaaatcaacgcttatgggtatgatcgcacgaaaggtaaaggctgacctcaatgttatagcgcttgtaggcgagcgaggcagagaggtaagagagtttatagagaatgacctcggcgaagagggaatggcaaggtcagtcgtggtagtcgccacgtcggatcagccggcaatgatgaggaataagtgtccgatgacggcaacggcaatagccgagtacttctgcgcacagggcaaggatgtactgctgatgatggataacctgacgcgttttgcgatggcacagcgtgagataggcttatctacaggcgagccgcccgtagcaagaggctacaccccgtctatatatgccgcaatgccgaagctgctcgaaagagccggcaactttgaaaaaggaagtatcacgggtatatatgcagtgctcgttgagggcgatgacacgaacgagcctatatccgataccgtaagaggtatcattgacggacatatcgttctcagtcgtaagatagcggcgcagaaccactaccctgctattgacatattgccgagcatatcacgacttatgtcggtgattgccgatcctgagcacaagaaagcggcaggcaagctgagaaacctgctggctttatataataacaatggcgacctcatcgcgatcggagcttacaaaaagggaactaatcccgctctggatgaggcgataaagaagatagacaagatcaacaacttccttatgcagggaatgtatgaatcgttctcgatggaggatacgataaagctgctcaaggcggcggtgtcgtga

SEQ ID NO: 942 - DNA, 1200 bp, Eubacterium siraeum
  misc_feature: SEQ ID N?2456789
atgggaaaactgaccactctgtcggagatgcagcttgacgctataggcgagataatgaatatcagtatgggaagtgcggcaactgccgtatccgagctgctcaacgcaaaagtgtggatcactacgccgaaggtaagcgttgtggaggcttcacggctgaattacgaccgcttagagccggctatatgtgtaaaaatcgaatatatcaagggtctttcgggctctaatctgatgatattaaaggaggacgatgtgcagctgatacttaatcagctgatgggtaagccgcctgttatatcaccggactttgagtttgacgagcttaatataagtgcggtaagcgaggttatgaaccagatgatgggcgcatcatctacagcgcttgcggatttcctcggaatgagcattgatatttcaacgccgacaccgtatatcctcagcgagataaacatagcagaccttcagaactatgagcagaccgatatggttgccgctatcaattttgaccttaccattgacggcgttataaaatcggaatttatatcggtacttgatataaatcttgcggcaacgcttgcagacagggttctcggaggtgcagcttcggcagaggctcccgcacccgagcagcaaacgactcccgcgccgacaccggcgccttctccggtcgagcaggtcgctcctgcaccgtcaccgataccgcaggcaatgcctgctcaacagccggtacagccgacagcacctatgccgactccgcaaccgatgccggatatgtatgcgcaacaaggttattacggttatcccggtcagcctaatcccgctatgtatgctcagccggtacagcctatgatgcagccgcagcctgcggttaactaccgcaatgcacagcttgcacagtttgagaattttgaagctccgctcggtactgagcagaaggaaaatttacagctccttatggacgtaccgcttcagatatccgttgagataggttcaacgaggaaaaagatcaaggatatacttgagttttctcagggcactatcattgagcttgagcggcaggcaggcgcacccgttgacgttatggtaaacggaaaccttatagcaaggggcgatgttgttgttatagacgataactttgcggtaagaataacggaaatagtaaaatcgaaatttatggacagcctcggtaaaggcgaataa

SEQ ID NO: 943 - DNA, 924 bp, Eubacterium siraeum
  misc_feature: SEQ ID N?2456792
atgacaaaagcttttggtcttgcacttaaaaaaatgtttatcgacaacaagcggatatttatccgctttatcgtgtctttaacggtatgtgttgcgcttatcggggtgctttgcagtgttacggcatttgcgacagacaataacgccgcgggtaatgcggcggcatcagccgcgacatcgggcaacgcatctgccgcttcgtcaggcggtacggagtcggccggctcttcggtaatgaaggatcttatcggtgttgacggttcgcagtcacttgaagtcatactgcttgtaacggtgctgtcgcttgcgccgtcgcttctcgtgatgatgacatcgtttgcgaggataataatctgcttcagctttttaagaacggcaatgcagacacagtccacgccgcctaatatggtgcttacgggactgtcgctgtttctgacgatattcataatgtggcctgttttctccgagataaacgaaacggcatatcagccgtatgcggcgggtgaaataacgatggaacaggctatggacgcggcgggaaagccgctcaagacctttatgctaaagcagacatcgaatgatgatatgaagttctttctcgacctcaagggtcagagcatgagcgacattaccgatggtgcgacagataacataacacttgaaaactacagcgagaagctgggctttgaaacagtcattcccgcttttatagtaagcgagctgaaacgtgcgttccagatgggctttctgatattcataccgttccttgtaattgaccttgttgtatcgtcaacgcttatggcaatgggtatgatgatgcttccgcccgctatgatatcgctgccgttcaagataatacttttcgtattggttgacggctggcagctgatggtaggaacgatcgtaaactcgtataatttgtag

SEQ ID NO: 944 - DNA, 1062 bp, Eubacterium siraeum
  misc_feature: SEQ ID N?2456795
atggcaggcgaagaaaaaaccgaaaaagccaccccgaaaaagcgtaaggataccagaaaaaaaggtgaggtactgcaaagcaaggaagttgcggtcgcggttttcgtggtgggaatattcgcatttcttgcgatattcggaaactatatgtttcagatgctgttaaactttatggagcagtcgatgtcatctatagataagacgggcaataccgtggagtttgcgatgagcgtattccggaaggtggctataatctgcgtatgtactgtaggtcctattctggcggtgggagttgtgctcagtgtactgcctgtaatcgtccagacaaagggactgttcagtatggaggcgatgaagccgaaattcagcaggttaaatccgtttacgggtatcaagcggttgttttcgatgcaggcgcttgtgggacttgtaaagggacttatagaaataatagttgtagtcgctatcctgtactttcaggtaatggacaggataagcgagttcaagaagctgatagataccgatgtcataaagatagttgcgtatatcagtgaaacggcgatgagcatgatcgtcacgatattcgtaatgcttgtgttcgtggcggcggcggactatgtctttcagtggtggtcgtttgagaaaaagctcaagatgtcaaagcaggaagtaaaagacgagtataagcagctcgaaggtgacccgcagataaagggtaagataaagcgtaaacagcaggaaatggcacagcaacgtatgatgcaggaagtgccgtccgcagatgtggtcgtgcgtaaccctactcactatgcggtagcgctgaaatacgacaggaaggtagcttacaaagcgcctgttgttgtggcaaagggtactgacgcactggcgctgaggatagtcgcggtggcgcaggagcataatgtatatattaccgagaaccgcccgctcgcaagaggactttatgaggcggtggacatcggacaggaaattccgagagagttttacacggcggtggctgaggtgctggcgatggtttatgaagagcaacatcggcggctgtga

SEQ ID NO: 945 - DNA, 729 bp, Eubacterium siraeum
  misc_feature: SEQ ID N?2456799
atgaacatagcattctacacgggtaagacggggcttattgcacagcaggaaggtcttaacgtttactcgaacaacatcgcgaacgtgaacacggtgggcttcaaggcatcgcgcccgagctttgcggactgtatctatacggtgcagagaaaaacagagcccgactggcagacaggtcacggcgagtatgtgcacagcactcagcttatgtacagcgagggcgtatttacatataccgataacgagcttgattttgcgataccgacggaagagggcttctttgcggtaatggataagtacggcgatgtaaactacacaagagcgggcgactttcagatgtcgcagataggcgatcactgggagcttgtaagcgctaacggagaatttgtgcttgactatgagggaaaccacattacagttccttttatagagggtacgagcaagcccgactatgatgcgctttcaaaaatgattggtgtgtacacattcgacaacaactttggactcgaacttctgggcagtaacaagatgactgctaccgagaggtcgggagaggcggttgccgacaggagtatcgacaagataagaatggcactcgaacgcagcaatacggacattgcgggcgatatggtacgcattatcgaaacacagcgctcttatcagatgagcgcaagagttgtacagacagcagatgagctggagcgtataaccaacaacctcaggcagtaa

SEQ ID NO: 946 - DNA, 477 bp, Eubacterium siraeum
  misc_feature: SEQ ID N?2456801
gtgaacaggataatagtggggatatccgatcagaagctgtgcaagtcacctgatgttctggtaacatatgcacttggcagctgcgtcgggatatgtatgatagataaggcgctcggcatagcggggctggcgcacataatgctgccggacagcagtgcgataccgagcgataaaaacaagttcaagtttgcggatacgggaatacagctgttgtatgacagtatgataaagagcggtgcggcggcatcgaggatcaccgcaaaaatagcgggcggagcgaatatgtttgcgacaacatcgcctgctatgtcgataggcgaccgtaacgttgaggcaaccaaaaaaatgcttgcaaagctcggagtaccgataatagcatcggatacggggcttaactacggaaggacggtatctttcaatgcggcggacggctcgcttgagataatgtccagtcttaagggaaacaagacgatataa

SEQ ID NO: 947 - DNA, 666 bp, Eubacterium siraeum
  misc_feature: SEQ ID N?2457057
atggacgggaacggaaggtgggctaaaaaaagaggacttccgagaaaggcgggtcattcgcagggcgcaaaggtgttcaggcgcactgttgaggactgccgcgaggtcggaattaaatactgcactttctacgcgttttcaaccgaaaactggaagcgtccgaaggatgaagttgacgccattatgaaactgcttgaaaaatatcttgacgatatacgcagtatggcacagaagaacacaaggataatctttatcggtgataagtctgcttttgcggaagatatacaggcaagacttgttgagatagaagaaatatcaaagaataacgacggtctgtatgtgcttgttgcgctgaattacggcggcaaggacgagatattgactgccgcaaagcgtcttgcaagggattataaggacggaaagataaaccttgacgactttaccgaggacgactttgacgattatctctatacaaagggcattcctcctgccgatcttatcataagaccgagcggagagcagaggatctccaactttcttatatggcagggagcttatgcggagctgctgtttatggatgttctgtggccggatttttctaagaaggatcttattgcggcttgtaacgagtatgcaagaagaaacagaagattcggcggactgtaa

SEQ ID NO: 948 - DNA, 1053 bp, Eubacterium siraeum
  misc_feature: SEQ ID N?2457060
atgagcaagaaaaaagttaaagtaggaaatcttactctcggaggagagcatatatatatccagtcgatgctgaatatccctgcggacgatgtagagggtaacgtaaagcaggctgttgagcttgaaaaggcaggctgtgagataatacgcacggcagtgccgactgtcagaaatgcggagcttatttacgcgctaaaaaatgcggtagatatacctgttgtggcggacattcattttgattacaggatagctcttgaatgtgcggcggcaggcgttgacaagataaggataaatcccggtaatatcggggacaaggatagggtaaaggcggtggcggacgcttgccgcacccgcagtatcccgataaggataggagtgaacagcggttctgtcgagcgtgagctattggcaaagtacggaggaccgactgctaaagcacttgccgagagtgcatcacgtcatgttgaaatgctccgcgaatatgattttgacgatatagtgctttcggtaaaatcgtccgatgtaaagctgatgaccgaaagctacagactgatacacgaaatgtatgattatccgctgcatctcggagttaccgaggcgggaacaacacgaatgggaataatcaagtcggcggcgggaataggctcgctcctgcttgacggcataggcgatacgataagagtatcactgacagcagaccctgttgaagaaatttatgccgcaaaggatatactgaaagctgtcggaataggcggcggtgtgcagatagtttcctgcccgacctgcggcagaacaggtatcgaccttatatcaatagcaaagcaggtcgaggagcgtacaagagatataaccgccgatataaagatagctgtaatggggtgtgtcgtgaacggtcccggagaagcgagagaagccgatatcggcattgcaggcgcaaagggtgagggtataatcttcaaaaaaggcgaagttatccgcagagtgccggaagaaaagctcgttgatgagctgatgagtgaaataaacaagactgtaaacggacaaggaaagtga

SEQ ID NO: 949 - DNA, 978 bp, Eubacterium siraeum
  misc_feature: SEQ ID N?2457206
atgaagaaaaaagataaaataacgctgataatcggtgtggcagtaataattatatgtgcggtcgcagtgatatttatgctggataggtttgctgttatcaggatatttccgcgacctgtgccaaagcaggaaaagacgatacagcttgacgatttaggttcggcagatatgccggtcggtaactcgcttgttgtaactatattctgtggtgatgataaatcaagctgggatttcggtaacgaaaacgacagagcgttgcgtgagcgtgattttgccgcgttgaaaattgccgccgagtggctcggcaaacaggcagataattataataagacattttctcttgtatatccgactgatgaaaaaagtgatctgtactatgaagccgattttaagggcataatatgtaatataacagaaaatcccgataacacagaatgttgggagtatatagacggcaaaatcgacagtgcggcactgaaaaataagtataattgtgacaacattttatatctcttgtttataaacgagtatgatgatgataccgaaaatgatgataacttaaacatcgacccgacagccgaatgtatatacgacaaagagaaaaaatacaattatgagttttgccgtttaccgtcaattctgaacggagaacatctttcgcctgcggttatcgctcatgaaataatacatctttacggtgcgcctgacctgtatgcgtttgatgcaaatgatataaattacggggttactgtagattttattgagtattgcaggaaaaacgttccgcaggacattatgctctcaacctatgaccgtgaaacaggcaagcgcttacccgaccgtataacgcaggggataaccgacataaccgcctattatataggctggcttgatacgccgcccgaatgcatagacgagtatcgactggtgcactcacagcatgagtataaaaacggacaagagataaattcacaataa

SEQ ID NO: 950 - DNA, 1227 bp, Eubacterium siraeum
  misc_feature: SEQ ID N?2457256
atggacgaacacggatacaagaaaaccgacgatatttttacggcagatatcgttataataaacagttgttcggtgacggaaaacagcgataaaaaagcaaaacagctgataaataggataaaaagccgcgaccctatgaagacagtcgtgctaacgggctgcttcccgcaggcttttcccgaaactgcggcgaagctgtcggcagatatcataacaggtacagagcacaaggaaagtcttgccgatatgatagacatatttaccggcaacaatgtaaaacaggttgccataccgccaagacccgttaaaaagcaatatgaaaagcagaaaaacgccgatatgggcaagacgagagcgtttataaagattgaggacggctgcgacaggttttgcagttactgcataatacctaccgccagaggctctgtaaggtcacgccctttgcaggatataatcgaagaaacaaggtttcaggtttcgtgcggtcataaggaaatggtgcttgtcggcatcaatctttcctgctacggtcaggataacgggttgaggcttgcggacgcgatcgaggcggtatgctctgttgacggtgtcgaacgtgtgcggttgtcatcgctcgaaccggagctactgacagatgaggacataacaagaatggcgtcacagaagaagctctgcccgcattttcacctgtcgctccagtcaggaagtgccgctacgttaaagcgtatgaacaggcactatacgcccgatgaatattacgatatagtcgtaaggcttagaaaagcgttcccggactgtgctataactaccgatattatggtaggatttgcgggcgaaacggacaaagaatttgaggagtcgtgcgagtttgtaagaaaagtcggctttgcggcaatgcacgtctttacctactctataagagagggtactgcagcggcaaagcgcacagaccatgttccgcacgatgttgcggtaaagagatatcatgctatgagcaagcttgctaatgagctgaaagaagcgtacttccgctcaaatgtgggaaaaacggaaagggtgcttattcagcgcagagaaagcgaggaatatgcaaacggacttactccgcaatatgtccctgtacgcatctacggcagtgacgcaaaaaagcaggatataattactgtacaaattaccgaagcgtcaggcagtgatttttgtgtcggcaaagaaataaaatgcttgtaa

SEQ ID NO: 951 - DNA, 231 bp, Eubacterium siraeum
  misc_feature: SEQ ID N?2457257
atgaaaacagctaatatcagaatcaataccattgaagacgttaagaatttcgtaactacagttacaaagtgcaattacgatgttgatatcgtaagcggcagatatgcaattgacgctaagtcgataatgggtatcttcagcttagatctttcaaagcctcttgagctccgtgttcacagtgatgactgtgatgagcttatggctgagcttgataagtatatcatcaagtaa

SEQ ID NO: 952 - DNA, 675 bp, Eubacterium siraeum
  misc_feature: SEQ ID N?2457261
atgcgtgtactgtttatagtctgcgccgtactgggtactgtcgggatatgcggacttcttgtaatgctgctgttcttcagactgaaaataaatctcggcttcagactgccgaagggcaggacgataccgatcgagcagtttattccgcaaggaatatacggctatacggtatttacggctgtgttcggatatttcggactgttactgcttcctctgtcgctgccgtggtactttatcgtacctgccgatatagctatggcatttatcgtgaactttatcggtagacattttctctcccccgccgtaaagcgctttgtaaacggtaaagcgccgaagcccgatgacctcaccggatatgaagcaactgcgcttgagaatataggcgggaacggctacggcaaggtaaaagtaaaatacgagggtataagctaccgttttgacgcgatatccgtgtaccataccgatattgagtccggtgaaaaggtcgatgtggttacaggtgaagatgagcttctgtttgtccagaaaaaagacgaaatatataaagtttttgatgaagaaattgaacccgcgactaaagcggaaagcgacaaacacaccgaaccgaaaaggcagaatgacagctttgtaagaaagaaaaaagctgaaacaaatgaaaatcagaaagaagaataa

SEQ ID NO: 953 - DNA, 291 bp, Eubacterium siraeum
  misc_feature: SEQ ID N?2457595
atgagcgtagtaataatcggcggtaacgagcgaatggaaacccgttacgcagacatatgcaaggcttacggctatgacaaggctaaggtatttgtcaaggaaaacagctctcttaaaaagaaagtcggcactcccgacctgctgatactgtttacaaatacagtatcgcacaaaatgatgctgagtgcaacgcaggaggcaaagcgcaacagtgttcccgtggcaagagttcactcaagcagtgttgtagcactgtcacagcttttagccgaaagaagcgcggcagtatga

SEQ ID NO: 954 - DNA, 639 bp, Eubacterium siraeum
  misc_feature: SEQ ID N?2458384
atgagatttgatttagatatgcccgcttggaaatggccgttctacgttgcaagacatccttttgaaggatttgaggatctgcgttggaagaaagcttacaacacaaaggtttcgatggtgatcgtactttgcttcttcctgataacggtctgccagcaagttatgacaggcttcctgttcaatacgaactacgtcaagatattcaacatagtaccgcttctcgttcagacgatcatcctgttcttcacatgggtaatcggtaactggtcactgtgtactctgttcgacggcgaaggttcgataaaagcaataacaagcgtcagtgcatacgcgctggtgccctacctcatcactcagatagttgtaattatcgcaagtaatgtactgctgaggagcgaaggtgctttcattgtgttcttccagtatctcggtatactgtggagcgttgttctgatgatatcgggtatcaagaccgtacatcagtactctgtgcctaagactcttcttgctatcgtattcacggttgcggcaatggtagttatactgttcctgctcgtgctactgctcagcttgttccagcaggtctacatcttcggtttctcaatttataccgagctgatgtatcgattcagtttgtaa

SEQ ID NO: 955 - DNA, 546 bp, Eubacterium siraeum
  misc_feature: SEQ ID N?2458514
atggctgctgttgacaagacatacggcgacgcattgttctctctaataaccgaagaggatgaaaaggcactgcccgacattctcggacagcttaagggcgtgtcggaggtttttgccgccgagcccgattttataaagctgcttcgtactcctactatccttatagaggaaaagacagggcttataaaagaagtctttgatggcaaggtgcacagtttcgtgcttaactttctgtgcatacttaccgaaaatgacagactgcccgactttgaacggatactggcatactttacagagctgtataacgaaaagcttggtatagcagatgttacggtaacatctgcaatgcctctttcggatacggctgtcgaaaagatcagagcaaaaatggctgatatcacgggcaagaccgttaatatgacgctgaaaaccgacgataagctcatcggcggcgttgttatcagctacggcaatacgactatcgacggaagcgtcaaggcaagacttgaacagctgaaggcggatattgccggaactatcgactga

SEQ ID NO: 956 - DNA, 2487 bp, Eubacterium siraeum
  misc_feature: SEQ ID N?2458540
atggtcacagtgggtattatactgatgggctgtgtttttgcactgttttcatataataatacagaaaatgcaaaaaatgttaccgcagaaacaatagagtatataaaaaatcagtgtataaggtatgatgagataacatcgtcagaccttaccaagagcctgttccgcattattgataaaacgaaggagataagccgtgatatgcttatattcaacgatagctcggataatatcatgaagagttttatcggcgatcacaagcttaccggggttatgctgctggacgaaaaaggggagcttgagaatgaattatacagcgatgacacgggatatgacgtatggaagagctttatacatcaggataatgtattgagtgttgcatatgaaccgataaaaatatatgcagacagaatacactcatctccgtccggagctacaagcgataacgattattattacgattttgcggcagtcgcccgcaccgataaaaaaggtatagtatttgcatatctcagacagacaaaatctgtaatagataacggtcagccgacactggacttattgctgtcaggctttaagcttgcaatgaacggaagtataattataacagacaaaagcaacgtaatagcgactaataatgaaaaatacaccggaaaagcggttgtagattgcaaaatattggaaagctatgcttcgagcggcgataaagcgaacggtcttttgcgtatagttgacgatgacggctcgtattatggcggaatggataagtgcagaaattattacatctatgtctgttatccggcaggcaatgtatatatcgggcgatgggcagcgacctcgcttgcaactacaatttatataataatctgttttgtggcaatactgttttacaggtcaatacaggtaaagcatatccgtgaaacacgcattgcggaggaaaaatacaacgctaaactgcttcagtcggcagatgaagcaagacgcgcaaatatggcaaagagtgattttctgaggcgtatgagccacgatataagaacgcctatcaacggtatacgcggtatgatagagatagcggataagaatgatgatgacccggaaaaacggaaggaatgccgccgtaagatgtgggtagcctcaggctatcttcttgaacttgtcaacgacattcttgatatgaataaacttgaatcgggcgaaattgtacttgaatatgaaccgttcgatatatacgatatatttgatgatatattcacactcaatgaacagaacgcttataaacataacatctcgctcacttttgaaaagtgcgaaaatatacataacagactgatcggcagtccgcttcatgttaagcgggtgcttatgaatataatcagcaatgccgttaaatacggaagagagggcggatatgtaaaagtatcctgcaaagagctttctgttaccgaggacggaaaaacagcaatgctcagtataaaatgcgaggataacggcaagggcataggtgaagatttccggaaggtgatgtatgagccgttccgtcaggaaaatgaaagcgccagaacatcatatcagggaacaggtctggggcttccgatagctaaacggcttacagaaaagatgggcggcacgatcgagtgcgaaagcacgaaaaacgtcggtactgattttacgatagttcttccgttggatatagatatgacgaggcggtccaaatcaaagcctgaggtcgtggtagaggatcgctcacttgcaggtgtgaatattcttctggcagaagataacgaactgaatatggagatcacagaatttatgctgaaaagtgagggtgcaacggtcatcaaggcgtggaacggtgcagaagccgttgcaatatttgaaagctctgaactttattcgatcgatgtaattctgatggatattatgatgcctgttgtggatgggcttgaagcttctgaaacgatacggcatctttatcgcgcagatgcaatatctgtcccgataattgcgcttacggctaacgcatttaccgacgataagataaagactcagacggcaggtatgaatgagcatcttgctaaacctgtcgagtcaaaaaaattaaaggatgcggtgttcagctatatcggcagaaaaaatctcacaatgagagagtgctatgacttgttgggagaggactatgacagcgtgctacagcgtcttgagtgcgaagaagagaatgttgaacctgcaatacgcgaatttttgtttgataagcactttgcggagttttctgatgcaatgaaagagcattcggtcgaaaaggctttcagagcggcgcacaccatgaagggaatagccgcaaaccttggatttgaaaagttccgcagtgtgttcagcgaaataacggaatatttaagaaaaggcgattatgacagtgcgcaaaagcttctggtcactgtcggcaaggagtatataaggataataagagcattgaaaaggtgcaaataa

SEQ ID NO: 957 - DNA, 705 bp, Eubacterium siraeum
  misc_feature: SEQ ID N?2458604
atgaaagaaagcaggaatatcaatcaaacaaacgggaatgttctgataaacgccgctgacatatcacggcactacacaatggctgacggcacggtacaggcactgagcaatgtcagcctaaaagtaaatgtgggcgaatttgtagctataacaggtccgagcggctcgggaaaatccacgctgatgaatattctcggactgctcgacacctgcgacagcgggacatatatgttttcgggggttgacaccggtatgctgtcagatgtagagctaagtcgcataagaaacgaaaagataggctttgtattccaggcgttcaaccttatcccgacattatccgtgcttgaaaacgttgctctgccgcttaactacaggggtatgccgtccgcaaagcgcatagcacgcagtaaagcggcgcttgaagcagtgggattatccgcaaggctgtcgcacaagccgtatgagctttcgggcgggcaacagcagcgtgcagcgatcgcaagagcaatagccgccgacccggagcttatcctcgcagacgagccctgcggaagccttgacagccgctcaagcaaggaggtcatggagcttctgcgctcacgtcacgaatgcggtaaaaccgtaattcttatcactcacgatcttgaagatgccgcttacgctgacaggatactgacggtctgtgacggaaaactatataaataa

SEQ ID NO: 958 - DNA, 993 bp, Eubacterium siraeum
  misc_feature: SEQ ID N?2458618
atggcgaagatcactatactcggttgcggtttcggaacggcactttcaataatgtggaacaaatacggtcacaaagtaacagcatggtcaaagtacaaggaagaaatagatgctatactcaatgacggtgagcataaaaagctgttgcccggtgtaatagtacctccgacgatatatttcactaccgatctttcctgtgcgggtgactgcgatatattggtgtttgcgataccttctaaatttgtgcgtgaggttgtacagaaagcaaaaccgtttgttaaaaaggatactatagtagttaatgtcggaaaaggctttgaagagggtacagataaacgtctgtcgcaggttctcaaagaggagcttccggacaaccgtatagcggtacttaccggtccttcacacgcagaagagataggcagaaatatgccgacaaccatcgttgtttcatctgaagatgaagaaagtatgctgtatcttcaggaaaccttgcagaacgatcgcttcagaatttacagaaacagtgaccttataggctgcgagctcgggggagcgttaaaaaaccccatagccctctgctgtggaatagtagaaggaatggggctcggtgacaatacgcttgccgcgcttatgacaagaggtcttgccgaaataacccgtcttggcgttgccatgggcggcagaagagaaacgtttaacggtttgtccggtgtcggcgatctgatagttacctgtacttctcctcattcaagaaatcatcgtgcagggcttcttatcggtcagggtatacctgccgcagaagctgtaaagcaggtcggcacggtagagggttatcaatgtgcaaagatcgcatacgatatagcacgctcttataacgtacaggttcctatcatagaacagctctgcgaggtctgctataacggtcagaatccgcttgaagcagtaacaaagcttatgggcagacccagtaagtcggaagaggaagtgttctga

SEQ ID NO: 959 - DNA, 405 bp, Eubacterium siraeum
  misc_feature: SEQ ID N?2459196
atgaaaaaactcggtgttatacgactcatcgtctgcattgcggcgataataatggagcttttaccgctcggtgcggtactcaaatacggattgatgtccgacagcggtcatttgattttccgctttgagaattactcgtatttcgatgtcactccgttcggatatgcaatgttcaactatatgatatgcgctgtgatgacaactattacggctatgctttcgcttctgtggatattcttcggcaagaagcgtcagacacctattacggttttagcttcgatagcactggtaatgtcgctcgtcccgtaccttacacaggcattcaatgtttttactgtcataatctcagcacttatagcggcggtgcttgcactttcggtaataattcagataaagcacgagtag

SEQ ID NO: 960 - DNA, 1083 bp, Eubacterium siraeum
  misc_feature: SEQ ID N?2459198
atggcaaataagaaattgtacaagaaagaaagatttacgggctgtatggcaggcgctgccgcgggcgatgcgctcggctcgcccgtaaaggtgataacgcgcagtcagataaaagacatatacggcaggaagggcatacttaagctaagtccggaaaagcatcagaagtacgcccgcgtatcggacgaaacgcagactatgctcttcaccgctcacggtatactgtgggcagatgcggcaggactgagaacgaacgaagctgccccggcggactatgttttccttgcgcttcagcagtggctgtacacacagaccggtggtacagcatcggtggagctacagtggatacttgacgaaaaggaaaccggatttccgtgcaatctgctgggcgttcccgctcttgcaaaaaagcgcaacccgacaaaacaactggtacaaaccattgccggcataaagtctgaacacacatacggcagagtaggacgaccaataaacgccaataagctgttcgactgtctgccgagagctattccgacaggattgtatttttacagtgatcccatgcgcgcgttttctgcgggctgtgacctcggagcaataacacattctcacccgactgcttatcttgcaacaggctgtctttcctcgatcatcgcatttatctgcaagggaaattcgatcgagcagtcggttcttgatacgatgaagatactcaaaggctatgacggctttgaggattgctttgcggcgcttgacaaggcgcttgcattacttgatgagaacacatctccgcttaccgatgttgccgagctcggaaacggcagtacggcggactccgcccttgctatcggcgtgtactgcgcttgtgtgcattacgactatctcagcgcggtacagcttgcggcaaaccaggacggtatcagtgatatatgcgcgtttatcgcgggtgctctgaaaggcgcactgcttggatattccgagatcccctcgggctttgtaaaaaaattacagtttgcggatatggtaaaggactatgccgcaaggctgacaaaagccgctccgaaaggctttatgaataaataa

SEQ ID NO: 961 - DNA, 1548 bp, Eubacterium siraeum
  misc_feature: SEQ ID N?2459664
atgaagaaaacggagagctttgttgcggaaaacaattttgatccgttatggttaaaggttgattacataaacagcagtgatataataagccgcactgagtttaccgaaaaaatacgcggtgcaagagaatttttcttcaagaagggtgtaagctttgatgtcggttttgaaactgctttgcttgaggcacagcttaactgttgcgggcttatagactataagctcggagtactcaatgacgaaaagataaaacagtatctggcggaatgcggcaccgtgcttacttcgatccccgatatgctgatcgaatttacaactgttggatatatctgtgatgaaaataaaaaaatgtacaagctctatcccgatgaagaaaactacggcaggagaattatcggtgagcttacaaaggacgatataaagcaagtaatagaaacctcatctgtttatcttgcaaacgctgtcaaagataacggacaatttgactacggtgtaaatcccgtgaacgattttcatttcgttacatataacatactgcgtcattccggtactatctggagtcttatcatgcaatatgacactacaaaggacgaaaagctgatttcaaagatcgaaagtaccataaattttcttatgcagagtatagagtattccgatgacgaccacgcttatcttgttgagcgtaaggcagatgagataaagcttggcggaaatgcgatagcaatagtaacgttatctacctatgcgagcgtattcggcagtaacaagtatgacaagctgataactgctcttgcaaattccatacttgatatgcaggaagcggacggcagctattatcatgtattatcattccccggatttgaacgtaaagaacgtgacaggatagtgtattatgacggtgaggctacatttgcacttgccagagcctacagtgtgacaaacgacaggcgttatcttgatgctgctgagaaagcccttgattactttatagaaaacgattatactcgtttctgcgatcattggatagcatacgcggtaaacgaagtcacaatttatgatccgaaagagcgctatctcaactttggacttaaaaacgcaaacgataatctcgggaagatttttaatcaggatacaacattccatacgttccttgaacttcttatggcggcattcagtctttatgagcgcataaaggaaaagaaaatatatgcttcatatatgcagaagttcaactttgaggctttcatacgaaccatttacagacgtgctcactatatgctcggcggttatctgtatcccgaaaccgcaatgtatatgaaagtgccgttatcggtcgcttatacattctgtgtgcgtcacgacagctacagaataagaatagacgatgttcagcattatatcggaggttattataatttctacaacaattttgacaaacttgatgaatattacaaggatatcatcgacaaaccgaaaacagcacaaatcgatacgaatgcagacagcgaacgagcatcgtttgtaaactggatactcagcaatatataa

SEQ ID NO: 962 - DNA, 1077 bp, Eubacterium siraeum
  misc_feature: SEQ ID N?2460215
atgtcatcagcgtttaagttcggagagctttctgtttcaatattcggagaatctcacggtaaggcaataggtgttgtgatagacgggcttccgggcggaataaagattgatttcgacgcggtgcttgactttatggcaagacgtgcgcctaaaaaagacggcacaagcacaatgcgcagtgaaaaggattttccaaatgtagtatccggaatggtagacggtgtgctgacaggcactcccctttgcgctgtgatacagaatacagatcagcattcggctgattataagagcgtgagccatcttgcacgacccggtcacgccgattatacaggatatgtgcgttataacggcagtaacgacctgcgcggcggtggacatttttcgggaagaattaccgcgccgctggtttttgcgggtgctatcgcatctcagatacttgaaagtaagggaataacctcaggagcgcatatcctgtcaataatggacgcagacgatgaacactttgaccctgtaaacgtgaatgctgagcaattaaagcaagtcagaagccgctatcttccgcttatcaatgccaacgttgaacagcagatgagggatattatatctaacgcatctgcaaatctagattctgtaggtggaattatcgaatatgcggcggtcggacttcctgcaggcataggttcgcctatgtttgacggcattgaaaacagaatttcgcagatagtattcggtgttcctgccgtaaagggtattgagttcggcgcaggctttgatgttgcaaatatgtttggcagtcagaataatgacgagttctgcatcgaaaacagcgaaatcaggacaaggacgaataaccacggcggtattttaggcggtatcacaagcggtatgccgattatattccgcgccgcagtaaagcctactccgtcaatatcgtgtcctcagcagacgatagattatacaactatgacagaagaaacgctaaatatcaagggcagacatgacccctgcattgttccgagagcagtgccgtgcatagagtctgcggcaaacattgcgatcttatcttattttatttga

SEQ ID NO: 963 - DNA, 600 bp, Eubacterium siraeum
  misc_feature: SEQ ID N?2460216
atgagtatacccgttcctaaatacactctttatgaccgcaaggacattgaagtgctcgtggcgtatattctttacaaggtcggcagtatcacaaaagacgagcttatgcgttgcactgttgatcacgacttcgtgatgtattttgatctgatatgctgtctttttgatatggaggaaaaaggttttatcacctgcgaaaaagtcggtaatgacgaaacctgtcttccgacggcaaaaagcgaatatctcgctattgagcttgcttacactatacctctttcgataagagaagatactgtttactatgcaaaaaagatcacttcgcactcccggcttgaaaagacagtaaagactgagatagtaaaggtcgagcaaggcggctatcagctttgcatacggtttataaacgagatgggcggcacggatcttatggagcttaaaatctacgctccgacaaaggaaagtgccgagcagatggaaaagagggttttcgacaatcctgtgggtgcgtacagaaacgtactcaattcatttattcaagggtatctcactgtatcggaaaaggagatacaggaagtgcttgatgatacgaagatttaa

SEQ ID NO: 964 - DNA, 1281 bp, Eubacterium siraeum
  misc_feature: SEQ ID N?2460219
atggagctagtaactaaaagacccagaggaacagaagacaaactgccaaaagaaatatataagtggcacactgtcgagaaaatcgcaagaaatgttgccgaagcatacggctgcaaggaaatacgaacacctacatttgagcacacggagctttttcagcgcggtgtaggcggcacaacagatgttgtacagaaggaaatgtacacattcaacgataaaaagggcagaagtatcactcttaagcccgagggcacggcaggtgctgtccgtgcggctatagaaaacggactgctcaatgatgcgcttccgcttaaaacatattattttacacgctgtttcagatatgaagctcctcagagcggtcgtttgcgtgaatttaatcaggtaggtattgaatatttcgggactgcatcatcagcggcggacgcagaggttatagcgcttgcaaacgatattatcaagagcctcggtgtaagaaatgttgcgcttgaaatcaacagcatcggttgccctaagtgtcgtgcagaataccacaaggcgctgaaagaatattattcgcagtttaaggatcagctttgcggcacttgtcttgaaagacttgaccgtaacccgatgcgattactcgactgcaagagcgagatatgcagcagcttcaagaaagacgctccgatgatacttgactatctttgtgatgactgtagggagcactttgaaaatgtaaagaaacgtcttgatatactcggtgtatcttatattgtaaaccctttgatagtgcgtggactcgactactacactaataccgtttttgagtttatatccaatgagatcggctcgcagggcgcagtatgtgcaggcggcagatacaacggactggtagaggaaataggtggtaacagtgttcccggtcttggatttgcaatgggccttgaacgtatcataatggtaatggaaaaccagaagcttgaatttgagcctgagaagaagtgcgacctttacattgcgtcatttgacgatgatacaaatatttatgcaatggagctcgtacagaagctccgcgaagaaggattctgggctgagtgtgatatttcaggcagaagcttcaaggcacagatgaagtatgcaaataaaatcggtgctacttattgtatggtaataggcggcgatgaaatgcagactaaatcagcaaagctcaagcgtatgtcagacggtgcagaaacacctgttacgcttgatgacaaattctgcgagaaactcaacactatgatacttgaaatcgtataa

SEQ ID NO: 965 - DNA, 738 bp, Eubacterium siraeum
  misc_feature: SEQ ID N?2460220
atgtcacagattatagcagtaacagcaggtaaaggcggaacgggtaaatcgaccacttcagccaacgttgcccgcggattagccgctttaggcaagagaactcttctggttgagctcgatttcggattaagatgtcttgatataatgcttggcattaaagataaggttaagcacgatataggtgaatatcttgaaggtaagatcgatattcttacagcgacaactaaggttgaaactgtagaaaatctatatctggtttgtgcaacacgaaacccgtttatggatatcaaccctgaaaagatcatgggcgtatgcgaagagatgcgtcagcattttgactatataataatagacacagccggtgtcggaagctcggtgttcagcgttatcaaggcggctgagctgattcttatggtaacaactccggataccgtatgtgttcgtgacggtgctattttgtctgactttttatatgtcaagaattgtacaaatcagcgacttatcatcaataaggttagccagaattttaaggacgaagagatactttatgaccttgacgaagtaatggactctgttggtatacagctcttaggtgttgtgccggaggacaataatatcaaggtttgcggcgcaaaagggcttcctttgccgcctacttgtcccggcgcaaaagcatatgcggctattgcaagaagaatacttggggaagatgtaccgcttactatcaatatcaactaa

SEQ ID NO: 966 - DNA, 2046 bp, Eubacterium siraeum
  misc_feature: SEQ ID N?2460225
atgagtgaaattttagctccgtgcggagcacaggaaagtctgtcggcggctgttaatgcaggcgccgatgcggtttatttgggagaagaatatttctccgcaagaaaaaatgcagacaattttaccgccgaacagctttgtgaagcggtacgcttttgtcattacagcggtgtcaaggtatatgttacgttgaatacacttgtgtttgacagggagatatctcttcttgcaaaagcaatagagaactgcgccaaggctgatgttgacggctttatcgtgcaggatatgggggttgcgaggcttgctcggcagattgtgcccgaactgcccttacacgcgtctacccagatgactgtaaattcgccggagggcgcgattatggcgaaaaaactcggttttacccgtgtggttctcggcagagagctctcctatgagcagataaaagcaattgtcgacagctgcaatatcgaaaccgaactgttcgttcacggcgcactatgtgtctgtcttagcggtcagtgctatatgagcagtgttctgggcggcagaagcggcaacagaggtctttgcgcacagccgtgccgccttgactttacaagcggcgacaggcataatgcgctgtcgctgaaggacttgtcgcttattgaaagattgcctgaactacagaagctcggtgtaacatcgttcaaaattgagggcagaatgaaacgccccgagtacgttgcaggtgctgtgaacgcttgccgtacagctcttgacggcagaacgcccgatcttatttcgcttaaaaacgtattttcgagaagcggatttacaagcggatattttgacgatgatttcaggaatatgcagggtgttcgcacaaaagacgatgtaactgcggcaacatcgaaggtgctctcaggcatgaggcagtattatcataagccgttcaagcgcttttcagcggatataagcgttaatgtgcgtaaagaccggccgatctcattcaagatatcagctgatggtgtaagctctgtagcgatcggaaatgctcccgaggcggctgtcaacagagccgttactgccgaatatcttgaaagtcagtgcagtaaactgggcggtactgtatatttccccggaaatataaccgtaaatgttgatgacgggttgtcggtatcggccgcataccttaacgaactgagaagaaaagcgattgagagtgtcagtgagaaaattcttgaaaagaactctcatcgttacaaaatatcgccttacattccgcttgacagcaaggatggaaagaagatacgtcctgagttcagatgtgaggtaagtacctcggaacagcttgaacaggcacttttgcaggacgaatattcttttatatatgcgcctatgcatctgctgagtgcggatacacccgataaattcagaattattgccgtaccaccggtgttccttgccgactgcgaaaagcaagttatggaaaatctcggtgtgcttaaagaacagggatacgaacatatggctgttcatacgctctctcatatcggaatagccaaaaagtgcgggctaaaaccgcacggtatgttcaggctgaatatcacaaacagatattcgctcagagaatacgaaaagatggggctgtctgacactgttctttcgtttgagctgcttatgagtgacgcggtatcgctatgtgccgacagtgagataaaaaccggcatagtgggttacggcagactgccgcttatgataacaaggcgttgtccgataagtgacggcagaccctgcggaaagaaaaaaagacccgactgtccgcattatatcaccgacagacaaggtaacagtatgccttgcctgtgtagtgagaatacagtcgagatactcaatcccgataagctgtatctcagtgacagacagagcgagcttgcaaagtttgattttgtgttgcttaaatttaccgatgaaacggatacagacgcagtgcttgatatgtatcttaatgatataaaaccggacggaaagcttacaagaggactttattacagaggagtgcagtaa

SEQ ID NO: 967 - DNA, 1011 bp, Eubacterium siraeum
  misc_feature: SEQ ID N?2460226
atggaaaaagtaaaaatatctataagcggacacgatttttacttgaagagcgaagatcccgacagaatgtatgatgctgcggaaaatctgcagaaaaaaatagataagttaagctcaatggcatcttcaatgtcactgacagatatcgccatgcttgcagcacttgattttgccgatgagaattacgacagcagaaaaattgtagtaaaagcacagcagctttcccaggagatacaggctaaatctgccgcgaatgaaaaaagagcggtcgaacttgccgaaaagctgacggcatccgaaaccgagatagcatctcttaagatcaccgtttccgagtcacagagtgaattatctgcacttaaagaacagcttgcaaacattgataccgaaaagtcgggagagcttgaagcggaaaacgcaaagcttaacgagcaaataaaggtgcttactgccgaaaagaaaatgttgagcgaaagcaagagtgatgaagctgaaaagctcggaagtgagaatgaacggcttaatgccgagataaaagagcttgctgcaaagaacgcgatgctcactgaaatgaatgcaagtgacatttccgctttgaatgatgaaaattcaaagcttaaagcacagctggaacagcttaaagctgaaaacgcaaagcttagtgaaaatgcaacgggtacatctgcattaaacgatgagaatttaaagctcagagagcagatatccgaactaaacgataaaaatgcccgtaatgaagagatgctcgaaaagctgaaaacggaccgagagaaacttgccggtgagcgcggacaggacgagttgctccttgcacagatcgataaattacaaggtacggtagatacatatgagaagacctttgacgaatatgcaaatcagcgtaacgcagaggtcaaggacttgaacgatgagttatcggcactcagaaagaagtatgccgatctcagcgcacagatgaatgagatcgtcaacgacggtcagatgacgttatga

SEQ ID NO: 968 - DNA, 1257 bp, Eubacterium siraeum
  misc_feature: SEQ ID N?2460234
atgaggatagctctgtttacagaaacatacctgccgagcatcaacggtgtagtcacccacgtaaaaacattaaaagaaggtcttgaagcgctcggacatacggtactggtggttaccgctgattcaagagtaaacaatcatgttattgcggacgatgtaatgtattgtcccgctgtaaagctcaagaaaatctataattatgatatcgcacctccaataagcaaggagcgacttgacaagataaagagctttgcacctgatataatccatattcataacgaatttggtgtcggaatatccggtgtactgatagcacggacgcttaaagtgccgcttgtgtatacacttcacaccatgtatgatgactatgtgtattatgttgctaagactaagggctttggcaagatagttacttcggcgagccatctttacgcaaagatgctagcatcaacagcttcggctattacaggaccatcgcctaaggtttctgaatacttcaaagcctgcggcgttaagaagcccgtccatgttatacctaactcagtggagcttgatgtatttaagcccgaaaacgttgataaaaatgacgctgtcgagctgagaagaaagttcggttttgccgatgatgatatggttttctgcttttgcggcagactcggtaaggaaaagaacataacgttgcttcttgaatactgggctaaaaatgtcagaccggaagacaagataaagctgtttatacttggtgacggacctttgcacgaacagcattgtaaagaagctaaggagctcggtatagccgatatggtaaagtttgcaggcagagttgaacacccggatttacccgtctattatgcttgttgtgacgcatatatcaccgcttcgctttcggatacctgttctatttctatgcttgaaggtatggcaatgcatctgcctgtcctaagccttaaggacgatcttaatgtcggacaggtcaaggacggtgtaaacggttataattttaccgatgcggacagtatgtacgagcttctcaaaaagctccgcgatatgccgaaggacgagcttgccgagttcggcagacagacacgagagtcgattaaaacatcaggcgcgatacgtcttgcaaacgatttgcttgatgtatataaagaggctctggaagtctataagaaaaagaacagaaaacgcaagctcaaaaaacgctatcgtgttatcagacacaggtatgtcagacgctcaagaacatataagaattaa

SEQ ID NO: 969 - DNA, 1047 bp, Eubacterium siraeum
  misc_feature: SEQ ID N?2461916
ttggaagaggaacacaaggaagagctgtctgttatgccacaagctctgaaacagcctgtggtaagaggcggaatgatatggatcgcactaggtgcctgcgcggtatggcttatagcagtcggcgttatgttgatactaaagcttaccgaagcgccgcttcctccgaatatgatagactatacctgtacgctgaacgtggatatacctgccgagcctgccgtgcccgaaaagaaaaagtccggaatactgccggaatacagggagctgtatgagcaaaaccatgatatggtcggctggctgaagatagagggcacgaatgtcgattatcccgtaatgcagagcaagggctttgatcctacaaagccgatagattacgatgtggtttacgaaaagaatatgtactatctgaagcatgacttcaacaaggagtacagctattccggaagcgtaacggcagagtactgcgcacacatcggaagcgactatcgctcggctaatatcattctttacgggcacaatatggcaaacggaacatttttccgggatgtaaataagtttgatgccttgtattacggcagagaaatgtacgacgagcatccggtgatacagtttgataccatatacgaaaagggattgtacaagatattcgccatgatgcaggtaaatgtagaggaagaagacggcgaggtcttttattacaccgctacctttgatttcaaaaataagcaggaatttatcgattattatgcgcaagtgctggatcgcagttttatcttcacgccgcaggtcgatcttaagtacggcgatgaagtgatagcgctgtcgacctgtgattttcctttcggaaagagcaagagcataagatatgttctttttgcaagaagagtgagggagggcgaagatccgactgttgacgttacaaaaacagtgataaatcctgaccctctctattacgattattggtacagcgtttacggcggttcgtggggcggacgcaaatgggatcccgcgcttctgaaaggctataaggcacagaagaaccactga

SEQ ID NO: 970 - DNA, 1161 bp, Eubacterium siraeum
  misc_feature: SEQ ID N?2461922
atgttcggtcagttttcaatcgcttatcgcgacaaaaaactgtgcgagaatgaatacagaggttcaaagatgatgcttctgctccaatatctgatatcacagcgtggaagagagataacgcagaatgagcttatcgatcttttgtggtcggacagcagaaatcccgccaatgcgctgaaaacccttgttcacaggacgcgggcggtgcttgatgatatgataccggacggcggcaggctgatagcgggaagtcacagctcatacgcctttatcgaaagcaatgaatgtgtgatagattcttctttgttcaaggaatacatcagcaaagcagaagacgaatcgctttcaagaacaagacgcataagtatgtacaaaaaggcgatatcgctttataacagcggctaccttgccgtgacggcaggcgaaacatgggtacagccgataaacgtgtattttcatgcattgtataactcggccgttgacaaatgtgcacagcttttgtatcccatgggaaaattctccgagataattacactgtgcgaacgcgcaacgatgcttgaccagtcggacgagaaaatgcacgcaaatcttatccgcgcatttgtggcgatgggtgaatatgagcgtgccgcaaagcaatataattatattcgcacatatcttatggagcagtacggtgccgctccgggcgcacacctcaccgagctttacgagcttacggtaaagccaagaaacgatgtacagaataatcttgatgccgttatcggtgacctgtcgggcgatgacagcaaggaacgcaaaggcgttttctactgccagtacgaaatattcaaatatatattccgcctgtacaagcgtgaaagtatgcgccttgaaagcaagctgtccatatgtcttgtgtccgctgttgataatagcggaaatgagcttgaagatatcaagctgctcgaaaaggcgatggataagatatcgttcagcatcagcaactcactcagaatgagagatgtatacacacgctacagcagaagccagtatcttctgcttttgcttgaagccgatgaaagctcatttgacggcattgaggaacgtattatgacaaggttcagacgcagtaagacgatggacagcgtaaatgtaaactttaatttcaaggaaatatga

SEQ ID NO: 971 - DNA, 909 bp, Roseburia inulinivorans
  misc_feature: SEQ ID N?2462163
atgcttgataatatgttccagcagctttttgataaaggattgtctaacagcaccgtccgctacgcacagcgcattttgagcgtatcaatggaacacgcacgaaaatatcactatatcgaacataatcctgcccgtgatgtaatcacaaagtttggcaaacaaggaaaaacacccgacccgtacaccgttgagcaaatgcaacaatttatgagcaacgtgatcggtacggagtgggaaatgcccgttgtacttgccggaatgtatggattgcgtatgagcgagattatcggcttgcggacattcaatatcgacctcgaaaaaatgcagtttggtgttgttgagcaaatgcctttcaaggtaccacccggcacaaaaaccattacagaaatggcaccgacaaaatccaacgaccgcattttgccgattaccgaggaaacgctaccgtatttcctgcggcagtttgatttaatcgagcggcagaaagcattgatagaagcaagcggcggcgtgtactatgacaacaaactctttatcgcaaagccggacggctctccgcagcgcagggatagaatgtcggcaaacttcggtcagcttatccggcacctcgaaatgccgcacattcgtttccatgatttacggcatacggcagctacaaatatgcaccaactcacaggcgacttttataccgtaggcgagatattggggcatacactaaaaggcattggtatgtcgcttggtatttcaaccaaccttgaagcggtaacggcacaatacgtcaatgtacgacttgaacgaaaaaaagctgtccttgaaacctaccacaaagccctgcacccgcagaagcccacgccggataaaggcagcgagccgaaaaaagccaaaaagaaaagcagcgaaatagagctgtaa

SEQ ID NO: 972 - DNA, 1671 bp, Unknown
  BMI gene
  misc_feature: SEQ ID N?2462512
atggaacaggttaaaaattactataagagatttgttaaagagggctttgataagaacggcattctcaataagttcgagatcgattgccccgacaacttcaatttcggttatgatatcatagataaattcggcgagatagatcctgaaagaaaagcgcttattcatatcgatctgcaggagaaccgccacgatttttcttattcacagctgtcaaagctgtcgaccagggcagctaatctttttgcttcatacggtatcaaaaagggcgataccgtaatgttggtgcttaaaagaaattatcagttctggatcgcaataatcggtcttataaagcttggcgctatagcgatcccggcaacgcacttgcttacaacgcacgattttacgtatcgctttgagcgcgcgagtgttaaggcaatagtatgtaccgggtataaccccgatatcgcaaaatacgttgacgaggctcaggaagagatacacgccgacgggtttatcaagtttatagctaacggacacaaggacggttgggtgtcatttgatgacgaggtcgcaaatatgcccgaaactatggagcgtgtacaaaccgatacaagagagcatatgctgctttatttcacgtcgggtacaacgggctatccgaagatggttatccataatcacaggtacgcacttgctcatatacagactgcggcgcattggcagaatgttgacccggacggtattcatcttactatttccgatacgggttggggaaaagccgcatggggcaagctgttcggtcagatgtcgctcggtgcctgcgtattcgtatacgactttgataagttcattccgacagatatgctcaggataatgcagaactacaagatcacatcattttgtgcgccgcctactatgttccgtttctttataaaagagggacttgaaaattatgacctttcaagtcttaagtattcggctatcgcgggtgaggcactcaatccagaggtatacaacaagtggcttgagtttaccggtttaaagctgatggaagctttcggtcagactgagtctaccgctctgcttgcaaaccttgtaggtatgacaccgaagccgggttcaatgggtaagcctacacctctttatgatgttgatgtcgttgatgatgacggaaatcccgttcctgtcggagaggttggcgagatagttgtacgtgccgagcgcggtaaagacggactttttgacggctattaccgtgatgaggagcttacagaccaggcatggcatgacgggctttatcacacaggcgacacagcgtggaaagacgaggatggttatttctggtatgtcggaagaaacgatgatgttatcaaagcaagcggttatcgcataggaccgtttgaaatagagagtgtgcttattgctcatccttcggtgcttgaatgtgcggtaaccggtgcacccgacccgataagaggtcaggtggtaaaagcgactatagtgcttgcaagaggatatgagccgtctgaagagctgaaaaaagagcttcagaactatgtaaagaagaatactgcaccttataaatatccgagaatagttgaatttgtcgaagaattgccgaagactatcagcggcaagataagaagggttcaaattcgcaacgaggataacaagaaaaacaatttatga

SEQ ID NO: 973 - DNA, 1560 bp, Unknown
  BMI gene
  misc_feature: SEQ ID N?2462870
atggcggaattttcaacaaacgagcacgagctcgtactcgtcattgacttcggcggtcagtacaatcagcttattgcccgcagagtcagagaacataacatatactgcgaggtcatctcgtacaaaacacctatagagcagataaaagcgaagagcccgaagggtatcatcttcaccggcggtccgagaagcgtatatcttgacgactcgcccagaatgacaaacgaaatatttgaactcggcgtaccgatattcggtatctgctacggcgcacagtttatggtttacggtctgggcggtactatcggcaaggctaacgaaaacgctgccgcagaatttggcagaacagagtgcgaatttgacacaacctgtcccgtatttgacggacttaagaagaactcggtcgtatggatgagccacaacgactacatcgaggttctccccgagggcttcaaggctgtaggtcacagtgacaagtgcccctatgccgcaattgagaacgttgaaaagggattttacgctacgcagttccaccccgaggtaaaccacaccgagcagggctttgatatgctcggaaacttcctgtacaaggtatgtcactgcaagggcgactggacaatgaagaactatgcggaagaagctataaagcagatccgcgcaaaggtcggcgacggcaaggttctccttgctctttcgggcggtgttgacagctcggtagcctgcgctctgctttcaaaggcagtcggcagccagctcacctgcgtgttcgttgatcacggctttatgagaaagaacgagggtgacgaggtcgagcaggcattcaaggactgggacgtaaacttcatcagagtaaatgccgccgaccgtttcatcggcaagcttgagggcgtgtccgaccccgaaaccaagagaaagaccatcggcgaagaatttatccgtgtattcgaggaagaggcaaagaagatcggcaaggtcgatttccttgtacagggtacgatctaccccgatgttatcgaaagcggcacaggcgatgccgcagttatcaagtcgcaccacaacgtaggcggtctgcccgactatgtcgacttcaaggaaataattgagccgctccgtcttttattcaaggacgaggtaagaaagctcggtactgagctcggtctgtcagacgtactcgtatggcgccagccgttccccggtcccggtcttgcgattagaataatcggcgagatcacccgtgaaaagcttgcaactcttcaggacgcagactacatcttccgtgaagagatcgcgaacgcaggtttagaccgtggtataaaccaatatttcgccgttctgacaaatatgcgttctgtaggcgttatgggcgacgacagaacttacgactatactcttgccttaagaggcgttactacaagcgactttatgaccgccgacttcgcaagaatcccttacgacgtgcttgaaaaagcaagcgtgagaattgtaaacgaggtcaagaatatcaatagaatttgctatgatattacgagtaagccaccggctacgattgagtgggagtaa

SEQ ID NO: 974 - DNA, 711 bp, Eubacterium siraeum
  misc_feature: SEQ ID N?2462872
atggctgttttctttagcttttatgaaaacgttaacacggcagtgccgggttttgctttaaaaggagtatttaaaatgaagatatattctgttaatgataaggaatttgccgcatacggcaaggtacatacaggctatgatgtaggcgatctgctttcggcgctcgacaagagcacaccgttaccggatgctgtaggatatgttccgagcgaggcggcgcttgaaaacacaaagctgttcggacttttacagaataacgcttacggcggtatgcctatccagctcggttggtgcaacggtcacaacacaaagctcaactgccttgaatatcaccgtgacagcgagttcaacatcggcttatacgattttatcctgcttgtagcaaaggaagacgatatcgttgacggcaagctcgatacatctaaggtaatggctttcaaggcaaaggcaggcgatgtggtcgaggtttatgcaactacattacattacgctccctgcaatgcaactaaggacggttgcttcaaggtagttattgcacttcccaagggaacaaacggtgcaaagcccagcatcactcccgtatacgaagaggataagacactctgggcttgcaacaagtggcttcttgctcacgcagaaagtgatgaggctaagcagggcgcttatgtaggtcttacaggtgaaaatatcgatatcagggatattatctga

SEQ ID NO: 975 - DNA, 2034 bp, Unknown
  BMI gene
  misc_feature: SEQ ID N?2462924
atgaacgaaataaaaaaaagtcccgactcccctgtctgctatatcaagggtgtcggagaaaaacgagcaaagcttttcggaaagctcggcattactacagcgttacagctcgccgagcattatccgagaggatatattgacttcaatgaaacgactgcaatatctgatttgctaaacgacagtgaaaaccacgttgtaaaagcattcgttacaaagaagtttccgccgtattatggcaggataaatatattcaaggtcttagtcagtgacggcacaggtgatatgctgataacattctttaacagtgactattcattcacaagacttaagcttgacaacgaatattgcttttatggcaaagcggcgggagattttctgagaaaagaaatgaactcgcctgtttttatagacgcatcagagcctaacaagctgatgcctcgctacagcctgacaaccggcataacacagggcataatgtcaaactgcattaaaaacgtcctaagcgactttacctacgaggatcatctgtctgagagtatgaaagaaaaatatgacctcattgcttatgataccgctctcaggtggattcatttcccggaaaataaagggcaatatgacaaggcaaaataccgccttacgtttgaagagctgttccttttacagctcgggctaaagtcgatgaaaaatcacaacaagcgcctttcgggcgctccgatgcaaagcaaaagcattgaaccttactactcttctctgccgtttgtgctgacaggagcacagaaacgcgctattttcgattgttgcaaagatatgcaaaaggcagtaccgatgaacaggctgttacagggcgatgtaggctcaggtaaaaccgcagttgcggcaggagcggcatattttgcctacttgaacggctatcagtccactcttatggcacctaccgaaatacttgcaaaacagcactatgatacactttacaagttcttagcgccgcttggcgtcaacgttgctctgctcacaggttcacagacgaccgctcagaaaaaacagataagacagcttatagcagacggtcagatcgatgttgcggtgggaacgcaggcgctcatacagaaaagcacaaagttcaactcactcggacttgttattacggatgaacagcaccgattcggtgtagaacagcgtgcggcgcttggctcaaagggcaatgagccacatatacttgtaatgtcggcaacccctatcccccgcaccctcggtatgataatatacggtgaccttgatatatcgatacttgacgaaatgccgaaaggcagacttcccataaggacatatgctgtcgatacaagctaccgtgaaagattgtataaattcatactcaaatatgtcaataacggttttcaggcatatatcgtctgcccacttatagaagaaggcgtttcggaaaaggcggcggcaaccgactatataaactcacttcaaagtacctgccttgcaaacgttccgacaggacttcttcacggtaagatgaagcagaccgaaaaggacgcggtaatgcaagacttcaaggataacaagctgaaagtccttgttgcgacaacggtaatagaggtcggtgtcgatgttccgaatgcagttgttatgataatcgaaaatgccgagcaattcggactgtcacagcttcaccagctcagaggcagagtcggcagaggcacggagcaatcacactgcattcttgtcaccgacaataaaagcgaatacacaaaacagcgtatggatacaatggtacgaaccactgacggttttgaaattgccaacgaagacttaaagcttcgcggaccgggcgactttttcggaagcaagcaacacggacttccccggcttaagatagctgatatttacgccgaccttgacatactcaaagtaacaggcgaagcggcagatgatattctgcgtaatgacattcaccttgaaaagcctgaaaacaacagttatatgaaaatgataaacaaattatttgaaaatgcgcccaacgcataa

SEQ ID NO: 976 - DNA, 486 bp, Eubacterium siraeum
  misc_feature: SEQ ID N?2462929
atgacaaagaaagaaaagcttgttgaccttttaagacaggacgccagactttcaaacgaacagctggcggtgatgcttgacacctcggccgatgatgtcgcggcgatgatagcggagctggaaaagagcggaatgataatcggctataccgcaattataaatgaagaagaatttgacaggaactccgtctgcgcatttatcgaagtcagagtttctcccgagatacaatgcggttatgacgatgtagccgcagttgtagctcaatacgatgaggtttcatcggtgtacctgatgagcggcggttatgaccttgccgtaactataaagggcacaaatctgcgtgatgtagctatgtttgtaacggacagactagcgcctttaggcggtgtcctcagcacaacgacacatttcattctgcatagatataaggaaaaagacaagatgttcttaaagaacacagatgaaaggagtttggtatctccgtga

SEQ ID NO: 977 - DNA, 759 bp, Eubacterium siraeum
  misc_feature: SEQ ID N?2463053
atgaaaagaattgtaattacaggtgcttgcggcaaaatgggcagagtaataaatgacattgtaagcgcaagagatgactgcaggataatcgcaggtattgatattgcaggtgagcagtatgcagacttccctgtatataaaacaatgtacgatttaccggaaaagccggatgtaataatcgacttctcgcacccctcactgcttgatgaactgctcgactactgcaagataaacaatgttcctgtagttgtagcgacaacaggctacacagaagaacagataaagcagataaaggcagcggcagatcagatcccggtattcttcacattcaatatgtcactcggaataaatcttcttgttgaccttgcaaagcgtgcaacaaagttactcggcgatcagtttgatattgagatagtcgaaaagcatcacaacctcaagaaagacgcgccttcgggaacagcgataatgatagcggaagcgataaatgaagagctcggcaacaagatgcactatgtatatgaccgtcacagcgtgagaaagccccgtgaaaagaccgagatcggtatgcactcgataagaggcggtactatagtaggcgaacacgatgtgatatttgcaggacgtgacgaggtcatcactctttctcacagtgcaggctcaaagcaggtattcgcagtcggctctgtcaatgcggcagtattcttaagcgactgtgaaaaaggtctttatcagatgtcggatcttctttccgaagtataa

SEQ ID NO: 978 - DNA, 918 bp, Eubacterium siraeum
  misc_feature: SEQ ID N?2463057
atgggcggacttcacaagtttatgaactgggacagaccgatacttaccgacagcggcggatttcaggtgttctcgcttgctaagctcagaaagataaaggaagagggagtatatttcaactcccacgttgacggcagacgtatttttatgggtcccgaagaaagtatgcggatacagtcgcacttagcatcaactatagctatggcatttgacgaatgtatagaaaatccctcgccgtatgattatgtaaagaagtcggtcgacagaacaacaagatggctgcagcgttgtattgacgaaatggcaagactaaattctctgcccgaaacgataaacagacaacagatgctgtttgcgataaatcagggcggaacttatgacgatataagagccgagcatatgaaaactattgcaaatatgaatgttgacggcgtggctatcggcggacttgccgtaggcgagcctacagacgttatgtacaggataatcgaaaccgttatcccccacgctccgacagacaagccgcgttatcttatgggtgtcggcactccgtcaaatataattgaagccgtgtacagaggcgttgatatgttcgactgtgttatgccgagcagaaatgcacgtcacgctaccgtgttcacatggaacggtatcacccacgttacaaatcagtgctttgaaaccgattcgttaccgatagaccctgaatgtgactgtcctacctgccgcaatttctcaagagcgtatatacgacaccttttcaagtcgggagaaatgctcggcggaagacttgccgtacagcataatctgtacttctacaatacgcttatggaaaagataagagcagcaatcgaagagggaacatttgaagaattcagaaatcactattcgccgcttttagcgtcaaaacttgtctga

SEQ ID NO: 979 - DNA, 897 bp, Eubacterium siraeum
  misc_feature: SEQ ID N?2463068
ttggataaacataaatttgaaggcattataacaaaggctgtcggcggcaactactatgtagatgtctccgacggcgttttatgttgtaatgcaaggggagtattcagaaaagaaaaaatatcgccatgcgcaggcgataatgtagttgtatgcgtagaggaaaattccgttccgcttatcacagagattaaggagcgcaaaaatcatataatccgcccgccgcttgcaaaccttgactgtgcattgcttgtaacatcggctgttgaccctgtacctaacacacttgtaacggacaagctgatatccatatttgaaagtaagcatatagagccggttattgtgataacaaagcaggacatatgtgactgtgaagattttgctttgatttatcgtaattgcggatttaaagtattctatatggataacagcaccggaaacggaatagatgagataaaagagtatatccgaggcaagctttccgcgcttatcggaaactccggtgtcggaaagtccagcctgatgaatcatctgttcccgggacttgaaagaagcacaggcgatatcagcaaaaaacttggcagaggacggcacacaacaaggcaggttgagctgttccggcttgacggcggctatattgccgatacacccggcttttcaacggtcgaggtaagccgctatggatttattccgaaaaatgaactgcaatattctttcagggaatttgcagaatatctcggtaaatgccgtttcagagattgcgttcatctcaaagagagcggatgtgccgtgaccgaagcactgcgtgacggaaagataaacagctcacgctatgacagctatgcaaggatgtgcgaggaagcggataaactcaacgaatgggagtttaagaataagtaa

SEQ ID NO: 980 - DNA, 948 bp, Eubacterium siraeum
  misc_feature: SEQ ID N?2463229
atgagcgtaaaggtgtatattgacggtcaggaaggaacgaccggacttaaaattcttgagcgtttcaaggacaggaacgacattgaaataatgaagatagatgaggacaagagaaaggataacgatgagcgtaagaagtttatatgctcgtccgatttcacttttctttgcctgcccgatgccgccgcaagagaggcggtagagcttgcgaagggcagtaatgtccgtattatagatgcgtctacggcgcaccgtactaatcccgactgggcatacggctttcctgagctttcaaaggagcacagggaaaagatagcggcttcatcgagagtggctgttcccggctgctatgcaagcggttttatatcgcttgtatatccgcttgtaaaggcgggcataatgccaagcgattatccggtggtcgctcatgcggtatcaggctacagcggagcgggaaagaaggctatcgcagtgtacgaaagcgatgaaaagcctgaagaattttacagcccaagacagtatgcactccctcaggagcataagcacttacctgaaatgatgaagataagcggacttgactacaagcctgtgttcaatcctctgatatgcgattatttcagcggtatggtcgtaactgttccggtactgacaagacttctgccgaagaaatatacacttgccgatatccacaaggctttcacggagcattatgcagatgcaaatcttgtaaaggtaatgcctgttatgggcgagggtgttctcgaaaacggcttccttgccgcaaacacattatcgggtaagaacaatatggagatattcgtttgcggaaacgatgaccgtatagtgctttgctcaaggcttgataacttaggcaagggtgcaagcggcgcggctgttcagtgccttaacataatgatgggtattgacgaaacgaccggtcttgtataa

SEQ ID NO: 981 - DNA, 852 bp, Eubacterium siraeum
  misc_feature: SEQ ID N?2463231
atggaacttgaaaacgaaaagagagccggcatattaagcgatgctcttccttatatacagcagtattcaaacaaggttgtagtggtaaagtacggcggtaacgcgatgacaaacgacaagctgaagcaggcggtcatgtcagaccttgttctgctgtcgctgtgcggtatcaagatagtgcttgtacacggcggcggacccgaaataaacgcaatgctgaaaaaggtcggcaaggagagcaagtttgtaaacggactgcgctataccgatgaagaaacgatcaacatcgttcagatggtgctctgcggtaaggtcaacaaggatcttgtcgatctgctctacagccacaagggcagggcggtaggtctttgcggacttgacgatcatatgatcgaagccgagcagcttgacccggatctcgggcttgtaggcgagatcacgcaggtaaacgtaagcattataaacgatgttcttgaaaagggctatatccctgtaatttcgaccgttgcggcaggcaaggacggaactgtatataatatcaatgcggatacggcggcggcaagaattgcggctgagatgaaggctgaaaaccttattcttatgaccgatatcaagggacttctcgaagacaaggacgacgacaccacgcttatacatactgtcggtgtttcagaagtgccttatctcaaaaagcaaggcataatctcaggcggtatgatacccaagatcgactgctgtgtcgaggctgtccgaagaggtgtaaagaaagcaaatatcattgacggaagaatacctcattcaattcttatagaactgcttacaaacgagggcgcaggtacgatgattatctga

SEQ ID NO: 982 - DNA, 1167 bp, Eubacterium siraeum
  misc_feature: SEQ ID N?2463234
atgactaatctgcttataaaactctttataaaagacagtaaaaatactaccgatcctgccgtcagaaaatgttatgggtatctgggtgcatttaccggaattgtgctgaatatacttttgtttatcggcaagcttattgcgggtatattatcgggcggtatttccgtaattgcagacgcattcaataacctttcagacgcaggttcatcaataatgacctttgtcggatttaaaatggcaggaatgcccgccgacagcgagcacccctacggtcacggcagaatggaatatgtttccggtattataatttcttttattataatgatgatgggctttgagcttggtaaaagctcggtggaaaagatcttctcgcccgaaaagtcggagttcagcatacttgctgtatcggtgcttggagcgtcgcttcttgtgaagctgtggatggcgctgttcaatacaaagctcggaaagaagatagacagcaacacgatgaaagccgcggcggcagactctctgtcggactgcatttctacctcggtcgttataatttgtatgttcattcagctgttctcaggcgttgagcttgacgcatatgcgggtatcgttgttgcgctgtttatcctttacacaggcttcaacacattcaagggaagccttaccccattgcttggcacaaagccaaaaaaggagcttgtggacgagatcgaaagcactgtaatgagctatgacgggatagtcggcgtacatgaccttatggtgcatgattacggtgtaggcagaatggtgatttcgctccatgccgaaataagcagtaaaacagatataatgcttgcacatgagcttatagaccttatcgaggacgatctgcgtgaaaagtacaggtgcagtgttaccattcatatggatcctgttgtaatgaatgataataaggtcgaagaagtgaaaaaggtagttcttgatataataaaaaatatcgacagcagccttactatccacgatttccgcattacagacggtgtgtcgcgaattaacgtcatattcgatctggtaacgcctttcggcttcagatataaggacggcgagctttctgctatggtaagggaacagatagctgaaaaggacggcaggctgaatgcagtcattaccgttgaacgttcaatgtgctga

SEQ ID NO: 983 - DNA, 666 bp, Ruminococcus lactaris
  misc_feature: SEQ ID N?2463243
atgacgtttgcctattcgcaaattgaattatatattgactcagaggataaagtcctgacgttgataattgaacatccggatttcttttacacggtgctgaatgatataaacaatcagatagaaggaggaacaggattttcggttatatcgtgcaacgaaaaactaatatcatttgctaaacaagtaacgatgataacggaatttgtaccgtttgaaatgaaccgtaaggagcttatttctaaattatatgcgcatttgaaaaaatgctctgtaaacgaagatatgtttatcaggacaaatgaaatgctgtctgcgacagaaaggtacatttctgagttggtgcagtatgcggaaggtgaatttgttacggataagatatgcgatgttactcctttgttaaaaatgttcggacttaaattcgtggacagctatgatactttggaggaaaagcttttggagttttttcttgcgatgaccgagtatgccggaaaaacggtgtttatatgcgtgaatctccgtagctgcctttctttgcaaaaagccgaaaagctgtttgaatctgttattgagcacggaatatcactcttgtgcattgaatcgtctgacaggggaaaaacaggatatgaaaaaagagtagttattgatgatgatttatgcgtgatataa

SEQ ID NO: 984 - DNA, 1290 bp, Eubacterium siraeum
  misc_feature: SEQ ID N?2463387
atgcttagatgcagtttctgtgaaagaaccgaagatcaggtcgagcgaatcatatacggcgcaagcggctgtatatgcaacgactgcatagtggcatcatatcagatgcttatggagcaggagggcaaggcaggatcaaaaaagtctaaagtcaagcatgaggaagagcatgagcttatcaagccggttgatctcaaggcgatacttgataaatatattgtcggtcaggacgaagccaagaagacgatctgcgtttccgtatacaatcattataaaaagaatttttgcggtgatgatgaaaaagctgatgagatagagcttcagaagagcaatgtgcttctgctcggtcctaccggagtaggaaagacgatgatagcgcagacgctcgctaatgtgctcaaagtaccgtttgctattgcagacgcaacaacgctcactcaggcaggatatgtcggagaggacgttgagaatgttctgttaaggcttattcaggctgccgactatgatatcgaagcagctgaacacggtatcatatatattgatgagatagacaagataaccagaaagtccgagaacacatcgatcacccgtgatgtaagcggtgagggcgtacagcaggcactgctcaagataattgagggcactgtgtcgaatgtgcctccgcagggtggcagaaagcaccccaatcaggagtttatccagataaacacgaagaatatcctgtttatctgcggcggtgcttttgaaggtatcgataagctgataatgcagagaacaagctcatctgcactcggcttcggtgcggatgtcaagagcaagcaggaaaataagatcaacgaggcgctccatcaggttgaacccgaggatcttgtaaagttcggcattatccccgagcttgtcggcagacttcctgttattgcggtgcttgatgaccttgatgaggatgcacttgtgaagatactgtcagagcctaagaacgctattttgaagcagtataagtatatgttctctctggacgatatcgagcttgagataaccgacgatgctatgcgtgctatagctaagaaagcagcagagagaaagacaggcgcaagaggactgagaacagtggtggaagaagcactttcggatactatgtttgacgctccgagcgatgagagtataacaaaggtcgtactcacaggcgaatgcgttaccgagggcaagaagcctgaaataatcagagatgcgaatgtcgcaaagatgagaagaagtgcggagaagaaagcactcaagaagaacgctggctga

SEQ ID NO: 985 - DNA, 672 bp, Eubacterium siraeum
  misc_feature: SEQ ID N?2463393
atgaattcaggagtggtaaacttggcaggatctctctcgaaagaccttgaggaaaagaaggatctgttcctttatgataaagaagcgagaaatgaatacggcgttatctgcggtattgacgaagcgggcagaggaccgcttgccggtgatgtttatgcggcggcagtgatactccccgatgatatcgtgattgaaggaataaatgacagcaagaagctaactgagaagaagcgcgaggcgctgtttgatgtgatctgcgataaagccgtaagctactgtatcgcaaccgcatctgtcgaagagatcgacagtataaatatacttaatgccgctatgcttgctatgaaaagagcatacgagggactttcggtaaagcctgatacagcgcttattgacggcaataagacaccggggcttgatattcaggaaaaggcaatcgtcaagggagatgcgacaagtgcatcaatagcggcggcatcaatacttgcaaaggtagcgcgtgaccgctatatgaaagagcttgccgaaaaatatccgcagtatatgttccaaaagcataaaggctacggcacaaagctccactatgaaatgcttgacaaatacggggcaagtgatatccaccgtaagagctttctggtgaaatatttcaaggcaaaaaatgcaggcgaataa

SEQ ID NO: 986 - DNA, 312 bp, Eubacterium siraeum
  misc_feature: SEQ ID N?2463486
atggacgttatcagcgagattatcgcttatgaaaagcacgctgaagaaatagttgcagatgctgacaaaaaagccgatctcattctttccgatgcggctgttcttcgtgaaaaagagcgtatcagctatgagaaagaccgcaccgataagatcaaccgttatcatgatgagctgaagaagagcggagaagaacactattgcgcgacctcagcagagtgcaatgtcgttatgacccgtcttgatgatatgttttcaaaaaataaggataaatgggcgcgagagatatacgccaatatagttactgtcaaatga

SEQ ID NO: 987 - DNA, 654 bp, Eubacterium siraeum
  misc_feature: SEQ ID N?2463493
atggctgaacaggttttcccgaccaaaggcaaccttatcaaggcaaagcgttcgctgcagcaggcaaagcaaggctttgagctgatggacagaaaacgtaacgtattgatacgagaaatggtcgctctgaccgataagtcaaagcttgtccgcggaaatatcgagcagacctatgaaaaagcgtatgccgcactgcaaaaggcaaatatttcgcttggctctgtatcgacactggcgcagttcgtaccggaagaaaccgaccttaaaatatcgttcagaagcgttatgggtgttgagcttcctacagtcgagcttcccgataagcctatagttccgcagtacgacattgcaatgacaaattcgtatcttgataacgcttatatctgcttcaacgaaacaaaaaagctgacagtcatactcgccgagatagaaaacagcatataccggcttgctgtggctattaaaaagacacagaaacgcgccaatgcgcttaaaaacatcattattccgaaatatgaggcgcaggtcagatttatctccaactctcttgaagaaaaggaacgtgaggaattttcacgccagaaggtgatcaagagtaccaagataaagaaggaacaggtgcagaaagaaatagcgcaagcgaaaacagaataa

SEQ ID NO: 988 - DNA, 729 bp, Eubacterium siraeum
  misc_feature: SEQ ID N?2463494
atgaaaaggagttacattatggaatggaacagtataaaaatgtcaaaggctgagtttgaacgcttgcagaaagaatacacagaagccgctatgaaagccgccgaaaaagcgaagcattcgcaaccgaccgaggaggtatcgattgaagctccgcggtctgtaccaccggttcataccatcacacaagcggtactcgctccttcaaatgaaagtgcagacatgcccgaacctgccgaaaacgagataaccgaaaccacggatctatacgaaaacgatattgatatttcggcagaagccgcagaatacagcgcagaacaaaattcagccgaaactgagtcggaaacgcctgataatgacgaaacagcggactgcgatgaagatgccgaaacaccgctggatacatcggattttcagcaggcggaagaaatttgcaatagcgaaagcacgaaaaccgatgattccgatgactgcggcacagaggaggagcataccgatgaggagatacttgacagcttcgcaagcgtttttatgagtgaagatgaagccgacaaaaaagtcgaaaagctctccgccgacagacagaagagctgccctcccccgagcttcaacaccgccatacataaccacaataagagtatgagcaataacaaaaagccctgcggatgtgagcactgccgctgtcaaagcggcagtcatatgcaggagaaaggcgggcataaacctgactga

SEQ ID NO: 989 - DNA, 2253 bp, Unknown
  BMI gene
  misc_feature: SEQ ID N?2463545
ttggataatcagaaggtcgatatttccgtagagctcagcggctctgtggaggatgttatatataaaaacgccgataacggctatacggttataaatctcggctgtgatgagggacttatcccggtagtcggaacactcggcgatgtgaacgagggcgaacggctggatctgcgcggcggatggatcacaagtccgaagtacggcagacagttcaaggcggcaatgtgtgagcgctctatgcctcagaccgaaacagagatagtggcatacctcggctcgggcgttataaagggtctgggtcccgctatagcaaagcgcatagtaaaggcgttcggaactgaagcacttgatataatagataatgactgtatgaagctcacggcgataaacggaatatcctcggataaggcactgtacatatcaaatgagtatcataagataacaggagtaaacgaggtcataaagttcctcggtgaatataatttcgggcctgcacacgcaataagcgtatggtcggcatttgagcacgatagcataaagcagataaaaacaaacccctatatactctgtacgagcggaatagatatagatttccgttcggttgaccgcatggcggcagatctcggatttgacgcggagaacagcgaccgtgtgcgcgccggtatagtgtatgtcttgcacgagaacgccaacgcaggtcatacctgcctgcctgttgaaaagctcagggagtctgtatgcgacaacctcgggatcgaacgcagacagtttgagtcctgccttgacgactgcgaggaaaaggaatgggtgacaaggcttacactcggaaagcgcgagtttgtgtacctgcccgaatactaccttgcggaaacctatattgctaagaagcttgcgtttatgatacgcacctcggcacagtacgaaaaggactattccgatgagataagaggggtagaattttccgaaaatatacagtatgaggacttacagcgcgccgctataaatgcctgccttacaggctcggtgtttattctgacgggtggacccggtacaggtaagacgactactctcaacggcgttatcaagatactgaaagcgcataagaagcgcattctgctctgcgcaccgacaggaagagcagcaaagcgtatgagcgaccttaccggtgagcctgcaaggactatacacagactgcttgaagttgattataccgcaaagggtgagctgaaattcaagcgaaacgaaacaaatccgctccctgccgatgttgttattgccgatgaaatgtcaatggtggacgcacttcttatgtgttcgcttgtaagggcgataaagcccacatctaaattcattatggtcggcgactcaaatcagctcccgtccgtaggcgcaggaaacgtgctgaaagaccttatagcgtcgcactatatcccgtccgttgaactgaaagagatattcaggcaggcggcgcagagccttatcgtcaccaatgcacacaggatagtaaagggcgaatttccggtgcttgacgacagacagaacgactttttcttcatgaacaagccgaatgagagcgagatagcggggcttgtgatacagcttacaaaacagcgcctgcccgacacctatggattttcgccgatagacgacattcaggtgctgtgcccgacaaaaatgggagcggcgggaacgagagagcttaacaaacagcttcagcttgcgcttaatcccccgtcacagaacaaggcagagctgaaattctttgatgttatattccgcacaggcgacaaggtaatgcagacaaagaacgactatgacgtgctgtggacaaaaaacaatgaaaagggcagtgggattttcaacggcgatatcggaataattcgtgcggtcgaccgcttttctcagaatgtgacgatagactttgaggggagaatggcgatatacacctccgaaatgctgagaaagcttgaacacgcctacgctatcacgatacacaagagtcagggcagtgagtatgatgccgtgatcattccgataacgggttttacacaaaatctgctgtacagaaatctgctctacacaggtgttaccagagccaagaagatgataatagtcataggcacaaaacagcttgtaaagactatggtggataacgacagaaagatgctcagatattcgctgttaagacctctgcttgagattgaaatgaaccgtaaggatacgcaggaagaggaaaatacagacgaagagtga

SEQ ID NO: 990 - DNA, 450 bp, Eubacterium siraeum
  misc_feature: SEQ ID N?2463561
ttgacatacgatgacggtatatactttgatatcggtgaaagtgaatttgaagaagataataatgagctttatcttgtacattatgcggacaacggcgaagtcacatcgaatattgtggttatgtgcagtgacgaagacgaagacacagaaggcaaatctgtaagcgagatcggcgaaacttatatgagctattatactgtcggcgataatattgtttcatcaacaaaaagcatgatcaaaatcggcagtaccgatgtgttttacggaactgtgaaatcatcggacggagaatattctgtttctgcgatacagcacatatattttgctcgtcacgccaataaagtctatactgtaatagctcttcatcttgatgataatgaagagcaggtcacaaagtcgcttgaatacacgctcaattcaatgacttttgactactcggtcaacacatga

SEQ ID NO: 991 - DNA, 546 bp, Eubacterium siraeum
  misc_feature: SEQ ID N?2463563
atgcattttacttatacagataaagacatccttgacggcagatttgaattcagacagagcggtacatttcgggtattgtcaccgtttgctgcgctgaaaatagttatagcgtgtattattgaagcgatgatcgctccgtatactctcggcgtattatttagcggaggagcggcagcggataacacctcaattataataataaaaattgctcttgcagtaatcctgccggtactgcctatatggtatatactgatagttgcaggcggagagcagcaatacagctactatgccgacgaacgtcttatgcgtatagcgaataaacgtcatacctatattttcaggtactcggacatagaaaacgtgacctacaagccaatgactcttttcacaaagcaaaaaggctatactgtcactgttacgacaaaaaataccacgctgttcttccgttatatcatgccgtcttgtgcagaatttttcacaatacagtccactccgttctatatacttcaaaatccgcctttggcggaggaaaggaaagaccgatga

SEQ ID NO: 992 - DNA, 951 bp, Eubacterium siraeum
  misc_feature: SEQ ID N?2463872
atggaaatattaaagcttgatgcgccatgtaaggattatatctggggcggaaacagattaagagaggaatacggcaagatatccgacgcagataagattgctgaaagctgggagctgtcctgccataaggacggtcagagcgttatcgcaaacggcaaggataagggcaagacgctttctgaatacgttgccgagaataagaaatcgctcggtactgcctgcgacagatttgagtacttccccatacttataaagcttattgatgctaaggataacctgtctgttcaggtgcaccccgacaatgattacgctatgcgtgtagagggtgagtacggcaagacggaaatgtggtatatcgttgactgtgaggaaggttcacagctgatctacggttttgataaagaaatttcaagagaagagttcgcagacagaataaagaacaataccttacttgaggtcacaaacaatgttcccgttcataagggcgatgtgttcttcatcgaatcaggcacactccacgctatcggcaagggtatacttatcgccgaaattcagcagaacagcaatacgacatacagagtatatgactacggcagagtaggcaaggacggcaagcccagagaactccacgttgaaaaagctatcgatgttacagagctttgccctccgaaatacgatacaaagccgcagggtaagcctgtcaagatagacggcggcgaggaaacactgctccgcacctgcgaatatttcgatgttcataagataaaggttgacggcacggtaactcttgacgctgatgaaaagtcgttccattcgatactcgttcttgacggtaacggcaaggtcggcgagcttgacgcaaagaagggcgaaagcttctttatcccggcaggctacggtaaatacgagcttacaggcaaccttgaggtaattctttctgatatagtttaa

SEQ ID NO: 993 - DNA, 708 bp, Eubacterium siraeum
  misc_feature: SEQ ID N?2464286
atgatgaaatcggtacgcttattcaatgctaacacgctgttcaaggtttcgctcgttatgatcgttatggttgcggcaatttatgttataggcttcttagtcggctctgccgcaggaaaaagcgacagagaaaacacagacgacagcacagcagtcgcagaggaaaatgacgatattgcatattccgcccttaacacagtgtgctgtgttatcggctttgcaggtgcactcttaataaacggcaacgccataaacctttactataaggttgacggcagtaagtacgcaaggacgataaagcacggcgcagaaaagttcggcaagtcgcttgcaggctctgttataatctcgtctgttactgcggtggcagtatcgctcgtactcggaattttcacgcttgcaggcggtgagcttgagcttacagatctgccgcctatgatactgttttcgctcggcgcatcgctcctgtcctgcattctgatacgtcctctcgtatctgcaaaaaaagctaacgcaagaagcgttcttcttctgatagcgttgcttgtcgctatgtttattctgtcatcaacagcaacagcggcgagccatataagctacagtgccgcacttactatgagtattatattaacagcggtcggggcgatcggagcagctgtttcaacagtatccgcctgccgttacatcaagaaaaactggcagttctga

SEQ ID NO: 994 - DNA, 201 bp, Eubacterium siraeum
  misc_feature: SEQ ID N?2464289
atgactatcacaaaggattctataatcggcgatatcttagacgcgcacggagaggtcacagctccgtactttcttgaaatgggtatgcactgcttaggctgccctgcgtcaagaggtgaaactgttgcacaggcgtgtgatgtacacggcgttgatgcggacgagctggttaagaagctgaacgaggctgtcggcaactga

SEQ ID NO: 995 - DNA, 657 bp, Unknown
  BMI gene
  misc_feature: SEQ ID N?2464668
atgaaaactgtagcatttgtcccgatcaagcttaacagcgaaagacttccgctgaagaatatcaaaccgtttactaacggaaaaccgcttatttcttatattttgtcgaccttgagcaaaacgcatgggattgatgagatatatgtgtactgcagtgatgagaggataaaagattatctccctgaaggaatactgttcttaaagagagatccgtattacgacttgtctacaacatcgtttaacgaagttttgtcaagttttgcaaagctggtaaaagcggatgtttatgttctcactcatgcaaccgctccgttcatgacagcgcaaagtatagaaaaaggcgttgaagctgttgtcagcggcaagtacgagtcagctcattcggttgctatgcttaaggagtttttatggaaggacggaaagcctcttaactacactctcgacagcataccgcgtactcaggatcttccggatatatatacagaaacctgcggactttatgtgtatacatcggatctgatactcaataaaggcagacgtatatccgataatccgttccttatagaagtaaataagatcgaagcctgtgatatcaatgacgacgatgactttgttattgccgacgcaatattcaattcaaaattcaagactgaataa

SEQ ID NO: 996 - DNA, 1296 bp, Unknown
  BMI gene
  misc_feature: SEQ ID N?2464742
atgatttgtacagcaatcaaaaaagtaataggaagagaaatactcgactcaagaggaaaccctacagcagaagctgaggtatatcttgaagacggcactgttgcaagaggtacagcgcccagcggtgcttcaacaggtgagtttgaagcacttgagctgcgcgacaacgacaaggcaagatacggcggcaagggtgttacaaaggcagtagaaaatatcaatacgattataaacaatgccgtcagaggcgttgatgcctgcgatacctacgcagtcgataaagcgatgatcgatgccgacggcacaaaggacaagtccaagctcggcgcaaatgctattcttgcagtttctattgctgcggcaagagctgcggcaacttctcttgaaatccctctctacagatttttaggcggtgtaagcgcaaacagactccccgttcctatgatgaatattctcaacggtggcgctcacgcggcaaacactgttgacgtacaggaatttatgataatgcctgtcggtgctccttcattcaaagaagcattaagacagtgcgccgaggttttccatgcacttgcggcacttctcaaatcgaagggacttgctacatctgtaggcgatgagggcggctttgcacctgaccttgcgagcgatgaagaggctatacagttcattcttcaagccgttaagaatgcgggatatgagcccggtaaagactttatgatagcaatggatgccgcttcaagtgagtggaaaggcgaaaagaagggtgaatatatcctgcccaaatgcaaacagaagttcacatctgaacagcttatcgctcactggaaaagcctcgttgaaaagtacccgataatctctatagaagatgcgcttgatgaagaggactgggagggttggcaaaagctcacttccgaactcggcaacaaggtacagcttgtaggcgacgacctgttcgttaccaacaccgaaagactttcaaagggtatttcactcggttgcggaaactcaatacttatcaagcttaatcagataggctctgtttccgaaacgcttgaagctataaagatggctcacaaggcgggctacactgctatttcttctcaccgatccggtgaaaccgccgatacaactatcgcagacctcgcggttgctcttaacacctgccagataaagaccggcgctcccagcagaagcgaacgtgtggcgaagtacaaccaactcttaagaattgaggaagagctcggtgacagcgctgtttatcccggtataaacgcattcaacgtaaagcgttga

SEQ ID NO: 997 - DNA, 1191 bp, Eubacterium siraeum
  misc_feature: SEQ ID N?2464744
atgaacctcggacttctcggggtgtttaagtacagcggatttatcgcggaaaacatcaacgcaatagctggaagtcagataatcgatataaacaatatgaacttctttggtatagacttcctgccaatgaatatgctacctataggtataagtttcttcacattccagtctatgtcgtatacgatagacctttatatggggaatgttaaggtgcagaaaaatccgataagctttgcggcattcgttacgctgttcccgcagatagtcgcaggtcctatcgtaagatatgacgatgtggcaaaagaacttgacgacagaagcattactattgacctcatatatgacggcatcgtacgttttatcatcggactttctaagaaagtactgattgcaaacagtataggtgcattatggacggcggtcaagggcacggatatctctcaggtatcggtagtaagctcgtggctaggaatacttgcattcacattccagatttactttgacttctcaggatactcggatatggcaataggtcttggtaaaatgatgggcttccactttcccgaaaatttcaattatccctatctttctaaaagtatttctgaattctggcgaagatggcacatcacacttggttcttggttcaaatcgtatgtctattttcctctcggaggaaaccgtaaaggtatgcccagaacaattatgaatcttgcaataacatggtttctgacaggtgtttggcacggggcaagctggaacttcatactttggggttccctttatggtattgttatcatccttgagaaactttttctcggaaagtggttgcagaaaattccggcggtattctgccacatttatacaatgctgcttgtaatactcggctgggtactgttcgatacggctgacttacccacagccgccgcttatatagccaatatgttcggcgctggcggcacaccgtttatagacagcaccgcaatgtaccagatagcaacatacggaattacgttcataatctgcataataggatgtaccgacctgcctaaacttggggtggaatttataaaaaagaaaatcccaccgatcataaactacggcggaattgttgccatcatgggaatgttcgttatgtgcgcggcatatcttgtcgaccagacatataacccgttcctgtattttaatttctga

SEQ ID NO: 998 - DNA, 1647 bp, Unknown
  BMI gene
  misc_feature: SEQ ID N?2464865
agaggaaaggcgcatgcaagtgaagcagaggcaaaggagatacttaataagcttggcataggtacatttgatgcatctatggatatgctgtcaggtggacagaagaaaagagttgcacttgcaaaggcacttgtagagccaacagaagtgcttatccttgatgagccgactaatcatcttgataatgatatggttgtgtggcttgagcagtatattaaggcgtttaagggtgagcttcttatggtaacgcatgacaggtacttccttgacaatgtaactaacaagatagttgagatagaccatgccgcactttatagttacgagtcaaactattccggtttccttgagcttaagactgaaagagagcagatggaaagggcaaccgaagctaagaggcagaataccttaagacgtgagcttgagtggataagaaggggctgtcaggcgcgttccacaaagcagcaggcaagaatagaccgttttgaggatatgaaggaggcctcccgtgaggcaagggctaagtttgacaagagtcttatggatatgagctctgtaagcagaaggcttggcaagaagacgatagagcttaacaacataaccaaagcatatgacggacatacatacattaatgatttttcgtacattttcttaagagatgaccgaattggtataataggaagcaacggctgcggcaagtcgacacttatgaagataataacagggcagatacagccagacagtggaagtgttgagataggtgatacagtacatataggttactttatgcaggaaaatgagccacttgacgaaaatcagactgtgcttgagtttgtaagaagcataggcgaatatgtgcagactgtagatggcaaggcaacggcaagccagatgtgtgaaaagttcttattctcacctaagcagcagtggacaccgataagaaagctgtccggaggagagaagagaagactttatctgctgagcgtgcttatgagtgcgccaaatgtgcttatccttgatgagccgactaatgaccttgatatagaaactcttgaaattcttgaggattatctcgatggttttgcaggaattgtcataacagtttcgcacgacagatatttccttgacagaacagtcgacagaatatttgcatttgaggcgggaggccaccttacacagtatgagggaggctattctgactataaggaaaaatgtgtttcttctatatataatgtgtcaggaaatggaatatcgaaaggtgcagcattgtcaggtaatggtttggtatcaggcagcggtgcggcagcaggcggtatgacaggaagtaacggcgatatatctatggacggtgtgcagaaagctgcatcgggcaataagacacttacaagtaaggagtataacaagtcaagaagtgaaagacttaagtttacttataaggaacagaaagagtatgaaactattgacgatgatatagcagcgttagaaagtgctatagaaagaattgataacgagatggctaagtgtgcaactgactatggaaagcttaacgacctgtccagggaaaaagctgaaaaagaaaaacagcttgaggaaaagatggacagatgggtgtatcttaatgacctcgcagaaaggattgctaatcaatag

SEQ ID NO: 999 - DNA, 1608 bp, Unknown
  BMI gene
  misc_feature: SEQ ID N?2465062
atggtgagcgatcttatgtccggcacgatcacgggagaaagaatatggttctatataataggaatagtcctttgcctcgcattcatcgcattcgcggcaacgctacagtataacgcaacttttttcgcaacatatacagaaagcggagtaagaagaatatcacttgcggaaaagctcagaaagcttccgctctccttctttgcaaagcgcgaccttgccgatctgagctcggcgtttatggctgattgcgcctttcttgaaacagcgttttcacattttatcccggagcttgtcggctcgataatttcaactgtgattatagtgctttcactgtttatatttgattggagaatggctcttgcggcattctgggtcgttcctgtttcatttatcattatgatcttgtcaaagaagatacagaaaaaggttgcccgcaagaatatgaaagcaaagcttgactgtgcagacggcatacaggaatgtatcgaaacaatcacagaccttaaggcaaacaatgcggaagaaaaataccttgaaagcgtaaaagaaaagataaagaatgtcgaacactgcactacaacggctgaatttaccacagcgtcttttgttacctcgtcattcactgtacttaagctcggcataggcactgtcgctcttacaggcggtatactgatagcccggggagagatcgggctgctgacattttttatgttcctgctggtagcttcacgtctttatgagccgttacaggcagctttacagaattttgccgcagtgataagtgccgataccaatatagcgcgaatgaacgaaattctcctgcacgatgaacaaacaggcacaaacaagcttacaaacaacggttatgacatacgctttgacgatgtaagcttctcatataaagacggtgaaagtgtgctgcataacgtaagctttaccgcaaagcagggtgaagtcaccgcactggtcggaccgtccggcggcggtaagaccaccgtttcaagactcgccgcacgtttctgggatgccgacagcggcaaggtcacagtcggcggcatggacgtatcgcagatcgaccccgaaacactgctttcgctctattctatcgtattccaggacgtgaccctcttcaacaatacgatccttgaaaatatacgcataggcagaaaggacgcgaccgatgaagaggtaatagctgccgcaaagctcgcaaactgtgatgaatttgccgaaaagctccccgataagtggaacactgtgataggcgaaaacggctgtgagctgtcaggcggcgaacgtcagcgtatctcaatagcaagagcattccttaaaaattccccgataatacttctcgatgaagctaccgcatcgctcgatgttgaaaacgaaacgcttatccagtcggcattatcccgccttatcaaagataagactgtcctcataattgcccaccgaatgagaaccgttgcgggcgctgacaagatagtagttctcacagacggcacggtcgccgaacaaggtgcacccgatgtgctttacggaaacggcggcatctataccgatatggctgataaacagcttaaaggtagcacttggtcgatagcgtaa

SEQ ID NO: 1000 - DNA, 795 bp, Eubacterium siraeum
  misc_feature: SEQ ID N?2465063
ttgcgttttgcaaaactgaaaggaaagcaaatggaaaaagtaatcaactttttgacaaatagatggtttaagctcggcgtatccgttctgtcactcggctatccggtatttctcggatttgtggcatggcttatgatgggctattatcttgagcctactcatcagggagcgctcgtaacgacatacatttttataaatattatattcttcggacttatgctgttcacaagaaagcagataataacaaggatagttgcgatggtatcgccgtttatcgcctttgcgatattgctcttcggctttggaaactggttcgcggctataccgccgatagttgcgagtgtacttatattcttcctttccggaatgggcgaaaccacaaagatagtcctcggcactatctatcttataatgtatgttgtcggcatactggtttacctgaccttcaagatgctgttcggcaatatcacccttatggacgttgatctttcaagaagaagcacaagctaccgctactcccccgacaagcagtacaggatagtgctctatgtcgatcccgagaatgacgcaagccggtccgtatccttctatcttgaacagacagacggagatatcagccttccgttccttgaatgcagaaacgcaatgaacggactgcacataatcacatctgactacaacaagcccgccgatgtaacatggaaagacaagcatactctctatgtagacggaagaaaacgcgagttcaactttgacgcggttacagaagatacagccgcagaagaagattattga

SEQ ID NO: 1001 - DNA, 870 bp, Eubacterium siraeum
  misc_feature: SEQ ID N?2465248
ttgcatgattattatagcgcggttgtcttaaaattcagaattactttcggggaaaggaacacgataatgacacaggaacagttaaacgcaattcaggcaaaaaccaaaaagatcacaaaccatcagttacttgagatagtaaaaagattgaaaaaggcatcggatgaaaaagtaaatcccgagcctgaggagcaggcaaagtatatcgacgcactgatggaagcaaagcttattgcaccggtcactataaccgatatgaacggcgaaacggaaaatcagataaaggtgcagttctccagccttacaaaccctcagaaggaaagatattttatggtattcaccgacattgaaaccatgcgcaagaacatacaggataccgacaagatctttctgatcgccgttacatacaaggatctcgcggctatgcttgcttctcccaactgtgctatgaagggttttgttatcaatcccttcacagagaatataatctgcggacctcagcagtcggaggttatagcccgttatatcaatcagaagagatttaacaacggcgagcttactgtcatcaacgaagtaacaggcgtacccgaaaccgtaacaaagcctataataaagtactttgatgagcgcaaggatgttaaaaaggcatacataatgaatatgcgcaaggtaaatcaactcaaccgtcttataattgttgattatgagggtgaggacgataagttcaacgatttcgcaagcgatttcacagacaaggtgctcaaggacataaatgatgaaaaagcaccgtttatggtaatgaacttcaaccagcccgccgcaaagcaggcaaccaaggaaaaagtaccgttctatgtaaaagtgggataa

SEQ ID NO: 1002 - DNA, 1107 bp, Eubacterium siraeum
  misc_feature: SEQ ID N?2465384
atgaagtggttcaaggatcacggatacaatgtacacgtttgcgccggtgatgattttgaaccggatgaaccaaagaatataccatattgtgataaatactatattatcccgttctaccgttcgccctttgcgacgcagaatttccgatcttacagagagctcagaaagctgatagacgaaaacgagtatgagcttgtgcattgccatactcctgttgcggcggcgatagcgcgctatgctttcaggacggcaagaaaaaaacgcggtacaactgtactctatactgcgcacggtttccatttctataaaggtgcgccaaagataagcaggctgtattacattgccgaaaaagcgctgataaggtataccgacggaataataacgataaacgaagaggactattcggcggcaaagaaaatgtgccgcggcaagaaatgtaaagcattcaagatacccggaataggcatagatctgaaccgtatcagaaataccataaggacaaggaaagatatacgcgaagagttcgggataccgaacgatgcctttctggtaatgtcaaactcggaaatcaatcaaaataagaatgttgagtgttctattaccgctgtagccgctaataaaggcgtgtatatgctgatatgcggtacgggaaagagcgccgaaaagtgcaaggagcttgtaaaggagctgggatgcggcgacaggatcattttcgcgggatacaggtatgatgctaaggagctgctgcatggagcggacgcttttatattcccgagccgtcgtgagggactgggacttgcggcaatagaggctatggctacgggtctgccgcttatcgtatccgataacaggggaacaagagagtatgcggtaaacggagaaaatgcgatagtctgtgaatataacaatatatcacagtttataaatgcggtgcagcttttaagctctgacagggagctttgcaaaaagctcggtcataacggatatcataccgctgaaagatacgggcttgataattcgatagccgaaatggcggcaatataccgcggctatcttcaaattccctcagaaaataaaacgggagtgttatcgggtgaaaataagtaa

SEQ ID NO: 1003 - DNA, 1599 bp, Unknown
  BMI gene
  misc_feature: SEQ ID N?2465441
atggaagtgtggcttgcagttacactctgtgcggcggcattcgtagtcggagcggcgatattcggttttgtaatgtacaaaatgggtatcgagcatagaaaaaagacggcagaagcgcagatagaatctgccgaaaaggaagcgagcaggatagtatccgaagctaacgaaaaagctcaggcaacaaagaaaaccgcactggttgaggctaaagatgagatctttaaactcaaagagaacaacgaaaaagaaattcaaagactgaaaaacgaaacagacagggaactcaaggagcgcagagcggaggttacacgctctgaaagaagacttcagcagaaagaggagaatttagacaagaagaacgataagatcgaacgacttgaagaacagctccagaataagaacaagaaggctgaagaaaagcttgcggaagcagaatctatcaagaaaagccagatggatatactcgagaagatatccggctttactctcgatcaggcaaaggagcatctgctcagtatgcttgacagtgagctttcacatgaaaaggcggtcaagataacagcttacgaacagcgcctgaaagacgaatgtgacgaaaaggcaagacagtatatctcacttgctatttccagacttgccgcagatacggtatctgaagttgcagtatcggtagtacctctgcctaacgacgaaatgaagggcagaataatcggtcgtgagggtcgtaatatccgtgcgcttgaacagctcacgggcgttgaccttatcattgacgatactcccgaggctatcacactctcatgccacgatcatgtaagacgtgagatagcaagaatagcgcttgaaaagcttattcaggacggacgtatccatcccacgaggatcgaagaaacggttgagaaggcaaaacgtgaggtcgaactcaagatcaagcaggagggcgaacgtgccgttatggaaacgaacgtcaacggtctgcaccacgagcttgtaagacttatcggtcgtctttactaccgtacctcttaccgtcagaatgtacttaaccattctattgaggtcgctcatctcgcaggtattatggcaagtgagctcggagttgacgcaactcttgcaagaagagcaggtcttttacatgatataggcaaggctcttaaccacgagatcgagggctcacatgttcagataggtgtcgatgtctgccgtaagtacaaggagagccccgaggttatccacgctattgaagctcaccacggtgacgttgagatacactctgttatcgccgctcttgtacaggctgccgacgcaataagcgccgcacgtcccgccgcaagaagtgagaactatgagaactatatcaagcgtctgcagaagcttgaagagatatgcagctcttacaacggcgttgaaaagtcgtttgctatccaggcaggtcgtgaggtaagaattatgatcaagcccgaacaggtaaacgatgataagatgatagttcttgcaagagagatctctcagcgtatcgagaacgagatggaatatcccggtcagataaaggtacatttgataagagaaagcagagctattgattacgcgaaataa

SEQ ID NO: 1004 - DNA, 1089 bp, Eubacterium siraeum
  misc_feature: SEQ ID N?2465479
atgtacgatataacaaatgcggtttgcctttgggagcacttagccgcgacctcaaagccgataataatatacggcatgggtgacggcgcacagaaaatacttgatgtctgcgccgaaaagaatgtgaaagtatcgggctttatggcaagtgatgactttgtgagaggtcacagctttgcgggctttgaggtaaaaaaactgtcagatattgaacagcagttcggcgactgtatcatactcgttgcgttcggaacgcatattgacgaggtgatacagcggatcatagccatttcggacagacacgaattatatgcccctgatgttcccgtgataggcggcggattattcacaaaagaatatgccgaagaacacagagccgagctcgaaagagtttactcgatgctttcggacgaaaaatcgaagcaggtttttgacggctggctcgaataccgtataacaggcagaatacaaccgcttatccgcaatcagacagacaaatcggacggctatggtatccttgctctcggtgaaaacgaaacctatgcagaccttggtgcgtacaacggcgataccatatccgagtttctgagagtcaccagcgggcgcttcaacaggatttttgcaatggagcctgacgggaagaattacgcaaagatgaaacgcatacactacaagctgaacccttatgatttcaggacggtaaatgcaggcgcatggagctgtgacacagtatgcgagttcatatcaaagggcggaagaaattcatcgcttatcccttacgaaaagggcaagccgataaatccgtcaagaatcaaagaaatagatatgcgcagtcttgacagctttgtaaaggacgagcacataacttatataaaatatgacgttgagggcagtgaaagcgaggcgcttgacggcagtaaaacagtaatacagcgggacaagcctaaactccttgtttctctttatcatcgaaccgaggatatgtttgctcttccgctgaaggtcaaagagcttaaccccgcgtacaagctgtatttaagacagcatccgtatatccccgcgtgggatatgaatctttactgcatctga

SEQ ID NO: 1005 - DNA, 765 bp, Eubacterium siraeum
  misc_feature: SEQ ID N?2465492
ttgaatatcctttttataggagatgtcgtgggacagaagtcctgcgcaaatctcagagaaaaattgccttttctcaaaagagaatataacattgatactgttatagcaaacggtgaaaactccgcagacggaaacggcataacgcctgtaacggcaaaataccttcttgacagcgggatcgattgtgttacaacaggaaaccattgcttcagaagaaaggaaatggatgccttctacgaaacatcggacatagtgatccgtccggcaaatttcccggatgaagtagtcggtaaaggatatactgtacttgatcgcggcagatattcgatatgtgttataaatcttatgggtgttgtttttatgcagaaccttgaaaatccttttcactgcatcgacaggattctgagcgaaatcaaatcaaaggtaataattgtagacttccatgcggaagctacttcggagaaaagggcgctcggacattatcttaccggtagggtttcagccgtgctcggtacacatacacacgtccagacagcagatgaagagatacttgacggtcacacaggatatattaccgatgtcggtatgacaggtgttatcgattcggttctcggcatcaaaaaagagatcataataaacaatatgataacgggatatccgcagagatatgaatatgcagaaggcagatattatatctgtggcgcggttatttcggttgatgaaaaaacaggtatctgtacctcaataaagaggatcagatactga

SEQ ID NO: 1006 - DNA, 504 bp, Eubacterium siraeum
  misc_feature: SEQ ID N?2465497
atgagaactgatcagataaatgtaattttacttattgcgcttataagctggggcactgcgcagataataaagacattcatacattttatcaagacgaagagctttaaggcggaacgtcttacgggtgccggcggtatgccatcggcacattcggctactgtctgtgctacagcgataacaacttgcagagtatgcggcatatgctcaccggagtttgcacttgcaatgatacttgcaatggtcgtaatgtatgatgctatgggtgtcagacgctcggcagggcttcaggcaaaggagatcaaccgtttaaggcgtgtggtaaatgagcttgatgaagagtttatggataaattcgacgacaaggtcgatgagatagaagaaaagaagcccgaagagattcatgaactcaaggagtttttaggtcacactcctcttgaggttctttgcggtgctttgctcggaatacttatagctatggctgtaccgatacaggtagtcggctga

SEQ ID NO: 1007 - DNA, 684 bp, Unknown
  BMI gene
  misc_feature: SEQ ID N?2465510
atgagcaagacagagtttgctgacagacttgcagaaaacgaatacgataatataaatgtactgcaacttttcggtcttcaggacgatgtatatgtcggcggaagtatagagatctaccataagccgtgcgggcatacagacactgtaatattcaggcagggcatatacgagaacacgataaacgattgcataaacgactattgcagtgagtgcagacgtaagatgaacaataccgttgagtttgttaaaagctatattgaatggttgtatgtagatgtcaagactgacagctacggaagaaaaaacatacttcaatccggcgactaccgcgagtttttcaaaagcgatatcaatcttgacaagtttgtaaagcagaactatgccgcttcaccactcaggttgatgggtgcgatcgacagttacatagccaaaaatcctcgtacatattgtgacgaaaacggtaaagagataactacagttaaaattgacagtgtaaaaaacaggatcacccattttcgcggcagatgcgggatatcacgcaaggaactttctgataaaacagagatcgccttcaagaccattgaaaattatgagctcggcaggacaaagcttacctctatttcggtagaaaacgcgttcagaattgctcaggtgatgggcatacgcgccgagtatcttatttag

SEQ ID NO: 1008 - DNA, 369 bp, Eubacterium siraeum
  misc_feature: SEQ ID N?2465515
atgaaatctcttgaagaattagctgctatccgcgacaagatgcagaatgttgtcaatctcagaaatgaagcgacagactgcacaaagatcgttgtcggcatggcaacctgcggaattgcggcaggcgcaagacctgttcttaaagcattttccgacggaatacaggaaaaaggcataaatgatgtaatggtaatacaggaaggctgcatcggtctttgccaatttgaaccaatagttgaagtgaccgctcccggtaaggaaaaggttacttatgtcaagatgacacctgaaaaggctgttgaagttatcgaacagcacattatcggcggcaacgttgtaacgaagtacacgataaactccgctatgtaa

SEQ ID NO: 1009 - DNA, 639 bp, Eubacterium siraeum
  misc_feature: SEQ ID N?2465851
atggaagtaaagacgcttactttaggagagcttggaacaaattgctatatcgtaacgagcgccgcgggaaatgccgcagtgatcgatcctgcggacgatgcacagcgtatccttgatacactcggaaaggaaaacgcagaacttaaaatgatacttctcacgcacggacattttgaccatacgggagctgttgcagatctgaaagaacagacaggcgcaaaggtgtacatacacgcaaaggacgaatgtatgcttgacgacacaataaagaatgttgcgtatctttgtcctgattattcatataaaccgtttacggcagatgttttgctttcgggcggtgatataatacgccttgacgaggtagagttcagcgttatgagcactccgggacatacggcaggcagtgtggttttctttgcggataactgtatgtttgcgggtgatacgatatttgaaggctcggcaggcagaaccgacttctattcgggagattacattgcacagcgcaacagccttgcgaggcttgcggcactgcgcgaggattatctgatttacccgggtcacggaggaactactacattaaagcaggaaaagcagttcaatccgttcctcggacaaagctctgtggactttttctga

SEQ ID NO: 1010 - DNA, 504 bp, Eubacterium siraeum
  misc_feature: SEQ ID N?2465861
atgcttcatataggtcttgcgatagcgttgctcgtcctgtgcggttcgtacaaagattatccgaccctgtcaaagcgaacgggcattaaagctataactgttatccttacagtactgaccggaataaaagcaatcgctgtactgttcggtgtgatcccctcgtattacgctacggaaagcaacagcttctttccgggtctttcggtgttctcttcgatggcattcgcagtcaccgtgatatactacggcggcgttatcactctgagtgtcatcgcctgtatcaagggatacaagtgtatgagcaacaatgagctcacctccgcggcttacagcgaacagcagagagtaaacgccgcaagggcacagcagatataccgcgcacaatctgccgcaaatgttcagcagagctttacgaccgaaaacaccgcatggcagtgcaaaagctgcggcaagtataacgagtcggataataaattctgcatatactgcggacacataaggtaa

SEQ ID NO: 1011 - DNA, 708 bp, Eubacterium siraeum
  misc_feature: SEQ ID N?2465862
ttgatacttatagcattggcaatagtggtgcttgtactgtgctcaaagtacaagcagacgcctacaacaagcaagcgtacaggtgttatgacaacaacaataatcacggcgatactttcattctttgagctgataagcgtcgtgacgctcggcattctcaacggatttttcggcggtgaagcgttcagagagctgatgtgggaggctgtcgcaagcggcgatcttgactatgaaggctttgccacagcgagtgaggctgtagactttgcgctttcaatgatcacaacaggtcttattgtagctatggtattctgcgtatttataaccgctttcggaatattcgcgtccgtgataggcttcaaaaccatttccgacaaggcgcttaccgcagcagccgcgcagaacacggcggctcagcagtcatacaatatgccgaattatcagaataacaactcatatcagggtggttacggctgtcagaatggcggtcaacagccttatcagagcaactataacaactattacggacagccgcaacagaattatcagactgctgcacagagcaacacagctccgacaggtcagcccgcaagtaatgcaatgaatgcgactgttcctcaggatagcgactggtactgcatatgcggcagtaagaacgcacccggacagaatttctgctcaaactgcggagctaaaaagccaggataa

SEQ ID NO: 1012 - DNA, 1194 bp, Unknown
  BMI gene
  misc_feature: SEQ ID N?2465867
atgataaccgccgaaaccgcgatcggcagaatgacgcagaaaagtcctgtcggcgcataccgctcattcggaaagtcaaagtggctgacgctcggcggttggataaatgccgttataccgatacttatagtgccctactactctgttatcggcggctgggtcataaaatatctgtttgaatatatagcaggaaacagtgcaggagttgcaaaggacggatactttacagaatttatatcaagcggcggcagtgccgaaatatgtttccttatcttcacggcgcttacggttgcggtaattttcggaggggtacgaaacggcatcgaacgtgtatctaagtttatgatgcctgtgcttgttatcctttcgataatgataaccgcatattccgtcaccatgccgggcgcacttgagggtgtgaagtattttctgatacccaacttctctaacttctcgtggatgacggtagtatccgctatgggtcagatgttctactcgctgtcgatagcaatgggcatactgataacattcggctcatatatgaaaaaagacgtttcgatcgaaaaatcaactaccaacgttgaaatattcgacacgggcattgcgatcatggcaggactaatgataatacctgcagtatttgctttttcgggcggcgatcccgatacattgcaggcaggaccttcattgatgttcataactctgccaaaagtattttccggactttcaacaggaacgtttgtcggaatactgttcttcttccttgttttatgtgcggcgctgacaagctcaattgcgcttaccgaaagtgcggtttcgacctttcaggatcagctcggatggggacgaaaaaaagcaactgtaatagtcactgttattatggttgcactcggtacattgtcctgccttggctacggaccgctcggctttgcacagatactcggaatgcagatgcttgatttctttgacttccttacaaactcggtaatgatgccgatagcggctatcgcaacctgtctgcttgtttcgagagttgtgggcgtaaagaagattgaagaagaaatgaccgttgaaaacggcactttcaaacgaaagaagatattcaatttcatgataaaatatctgtgtcccgtattcgcggcgataattcttataagctcggtcgcaaacgcattcggcataataaagatgtag

SEQ ID NO: 1013 - DNA, 789 bp, Eubacterium siraeum
  misc_feature: SEQ ID N?2465872
atggaaatagcatctaagcaaaacagttatataaaggaataccgaaagctggtcgagcagagaaagtaccgcagacagtcgggatttttcccgtgcgagggcgcaaagcttgctgttgaagcggttaagagcgggtgcgccttaggcgaaaacgcatactatactgccgccgccgcggaaaaatatcccgaatgcatcagccttttgcaggagcactgcaaaatgatacagatcaccgaggaggtagcggacagtatttccgacacaaaatccccccagggaatttttattacggtaagacatcttgacaaaattctgaatttaagtacaatagatagtagcagacagtttataatattggaaaatttacaagatatgggtaacattggaacgattattcgttcctgtgacgcattctcgatcgacggtgttatacttgtcggagattgtgcggatgtgtttgcgccaaaaaccgtaaggagcgcgatgggttcgctgttccgccttccgatatactgctgtgaaaccgaagaagcgatcacgcttttgcaaaagtgcgggtttaccgtgtactcggcggagctctccgacagagcggttaagctcggcgaggaaaagctccccgaaaagacagctgttgtgatcggcaacgagggcaacggcgttaccgatacggtgaagaacctttgcgacaagtcgctgttcattccgataagcagtgccgagagccttaacgcatcggtggcggcatcggtcattgcatgggaattgtcaaagagcagaaagtag

SEQ ID NO: 1014 - DNA, 1317 bp, Eubacterium siraeum
  misc_feature: SEQ ID N?2465873
ttggataaaaataccgttaccgtgataggcgcgggtcttgcgggagttgaagcggcatgggcactcgcaaacagaggctttcatgtaagactttgcgagatgaaacccgaaaagtattcgcccgcccacaagtacaagggctttgcggagcttgtatgcagtaattcgctgaaaagtgccgacactgccagtgcctgcggtatgcttaaggaagaaatgcgctatatgaattctgtcacgatgatcgcggcagagaagacaaaggtcagcgcaggcggtgctcttgcggtaaaccgcacggagttctccgacgctgtgaccgaaatgataacaaatcacccggatatagagatcgtaagcggcgagataaccgagttccccgaaagtaacaccgtaatagcaacaggaccgcttacaagcgatattttcgccgaaaagatacagcagcgttgcggcagtccgctcagcttctatgacgcggcggcacctatagttacagcagaaagcattgatatgagccttgcattctttgcaacgcgctacgacaagggcgaggctgactatatcaactgcccgatgacaaaggaagagtacgaggcgttctataatgagcttgtaaacgcggagagcgtaccgctcaaaagctttgaaaatctcaaggtgtatgagggctgtatgcctgttgaggtgcttgcaaagcgcggtatagaaagtgtgcgttacggctgtatgaagcctgtcggtcttaccgacccgaggacaggcagacgaccttatgcggttgtacagctcagaaaagaaaacaacgagggtacgctttataaccttgtgggatttcagacaaacctgaaattcggcgagcagaagagagtattctcaatgataacaggacttcagaacgcggagtttgtaagatacggtgttatgcacagaaacacattccttaattctccgggactgcttgacaagaattttaagctgatcgacagcaataatatctactttgcaggtcagatgacgggcgttgagggatatgtcgaaagcgcggcatcgggaattatcgcgggaataaacctcgcaagggcgcttgacggcgaaaagccgctcgaactgcccgaaacctgtatgacggcggcgcttgcaaagcatataagcacagagaataaggactttcaacctatgggtgcgaatatgggtatattacctccgctccccgagaggataaaggacaagaagttaagatacaggacggttgctgacaggggtcttgcagatctaagaaaagcactctgcgagcagggtgttatcaaagagtaa

SEQ ID NO: 1015 - DNA, 354 bp, Eubacterium siraeum
  misc_feature: SEQ ID N?2465884
atgactgatatagaaattctgaaagagggcataaaggctctcgactcaaaaaaggcagatgatataaaaatactcaaggtgcgcgaccttacgatacttgcaaactattttgtaattgcaagcggttcaagctcgacgcaggtaaaggcacttgcagatgaggtcgatttcaagctcggcgagaagggcgaagagcctaagtccattgacggcaaggcaagcggaaactggatagttcttgactacatcgatgttgttttccacgttttctataaggaaacaagagatttctatgaccttgaaagactctggcaggacgctgaagaggttgatatcaaggagtttttggactga

SEQ ID NO: 1016 - DNA, 2193 bp, Eubacterium siraeum
  misc_feature: SEQ ID N?2466012
atgaatttaaaactgtcagtcccgaaaggagtggacgctgacagcgtgaacttttcgcttccgtttgacatagaccggaaagcaaaaacggctgacggacatctgacagccacaaaggatatgctgacggtatattatgacaataaagcggtacgggagttttctgtatcgaatataagcaagataacggtagaacagcttatcggctgttcaatgctgtgcgtaagggatatgcacggcagggatatctgcgtctgtcagttttcgcagaagtactatatgcgctatgcggagcttgcgaagatatacgagcattacatagccacgggtgaatttaccgagcatacagacgcggatgagcctagctgtcctaagtgcggagcggcgctcaggggtagcagtaaatgtatgttctgcgatgcgaaaaagggcgtgttcttaaagcttgtaaaaaggcttgcaccgtacaaggtgcagttctgcctgtcgcttctggctacattcgtactgtatgcgtttgacgttatcaatccgctgtttcagcgtatactggtagatgaccttatcgtgccgaataacagcgactggggacttttctggaagataacgctgtgcattctgacgctcaatctgtcctctatgggcttcaggctgctgcaggaggtatgtaactataagatatcaacggcatacggaagggatctgcgccgcgatatattcaacaagactcagcggctgtcaatgagcaatgtcgcaaagcgtacaccgggcgagcttatcaaccgcgtatcgggtgatgcggcgactttgcaggattttatgacaaggcagggcaaggatatgatattccagacgacagcccttgtcgctctgcttataatcatgtacattactaactggaagctggctcttgtcattactatccccttaccgcttgcggctttcctttcggtaaagtcgttcaatgcgataagcgtaagatatggcagagtatggcgcttccagtgccgtgcgagcgagcttctgcacgatgttctgcacggtataagagtagtaaagaactacggcaacgaggacagggagatagaagcgtacagaaaagcctcatcaaagtgggctgactctgtgatgagagctgatatcctttggtatatggtacagccgccgatccgctatatattcagtataggcgagttctgcgcactgttcttcggcggcagtatgatactgggcagagagatgcagctcggtgagctgatacagttcacgacctatgtcgctatgctctacggtcctatccagtggcttacaagcctgccgagagtgcttgcacaggcacgggtaagtgcaggaaaggtgtttgagatacttgaagaggataatgatataagcgacaccgaaaacgcggtcagccttgacataaagggcgatatcgagttcaagaacgtatatttcggctacaaggcgtataatcctgtgctcaaagatatttcgttcagcataaagcagggcgagatgataggaatagtcggacactcgggtgtcggaaagtcaacgctgataaaccttatcatgcggctttatgacccgacagcgggcgaggtgctgatagatggcaaggacgtgcgggatatatcgcagaactcactgcgttcgcaggtcggtgtggtattgcaggaaacgtatctgttcaacggtacggtgcttgacaatatccgttatgcaaagcccgatgcgacatttgagcagatagtgaatgccgcaaagacggcaaactgccacgacttcatcacccgtatgccggacggatataataccgttgtcggcgaaaggggttacaatctctcgggcggtgaacgtcagcgtatagcaattgcaagagcaattctccacgacccgaagatactgatacttgacgaagctaccgcatcgcttgacactcagaccgaaaagcagatacaggacgctctcgacaggctgataaagggcagaaccacaattgcgatagctcacagactgtctacacttgcaaatgccgacagacttatagtgctcaaaaagggcaaggttgccgagatcggcactcacaccgagcttttacgcaataagggcgtatattatgagcttgtaatggcacagaagcagaccgcaaggctcaggaagagtgaggcggctgtgccggttatggggtaa

SEQ ID NO: 1017 - DNA, 498 bp, Eubacterium siraeum
  misc_feature: SEQ ID N?2466476
atgtcatataccgatgatgaaagaataagggcaaaacgcagagcgctgtacatactcgctcagcgtgatcactcgaaaaaagagctttatgataagctgataaaaaactatcctcccgatctatgcgagatggtagttgagctgatgtgtgagcacgacctcataaatgaggagaagtacacacaaaagctttacaaggcatatataaacaagggttggggtaagtccaagatccgctttgagctacggagaaagggcttgcccgacagccttatttcacagcaggaagaagaatatgacgctgaggattttatagacgaaattatacatcttgtagataaaaaatatgcaaataagctggatttttctgactataagagcgttcagcgtgttactgcggcacttgcgcgcaggggatttgcatatgatgatataaagctagcattatcccgcgtgaaagacggagattatgacgaagaagaatattacgatgagtaa

SEQ ID NO: 1018 - DNA, 1455 bp, Eubacterium siraeum
  misc_feature: SEQ ID N?2466481
atgaaaaacatcactatactacgccttaataaaatactcagaatgacagcagggcttatggcatcggtgtgtcttattgctgtgctctgcggttgctcggcctcattttctgccggcgagcttttagcttctccaaggcttacagacgaacagaacgaaatatacaacgccctgaccgcaagtgcgggcagggttgatttgcgttatccccataccggagaataccgcagtgcattcgttatccacaatatagacggcgaacctaccgatgaggctatagtcttttatgagcaaagcaaaagcgaagccgcaaaagaaccggacgcacaggacggaaacgcagtcggaaacctgcgtgtgagcttccttgataaggatgaaaacggtaactggaaagcgacttatgagcttccggcggcaggtactgaggtcgaaagcgttgccttttcaaaactcggctcagataaggaaaagctgcttataagctactctgttctcggttcttccgacaagataatgtcggtgatcgactacgaaaacggtgttgcgacacagcttggaactataggatatgcgtcatatatgatgctggataatctgaccgaaagcggagaatatctcgcctgcttcaaccgcgacggcgcaaagaaaagcggcaatatgaccgtctacggctgtacggacggcaaaactctcggtatgatgtaccctgtactgtcatttggaaacggagttaccgattttgacaggataatgtctgcaagctgtcttatactcggcaaggaaatgccgtgcatagccgttgattatctgatttcggaaaactgctacggtacaagcgtactgtattataacggaaacgcattcacaacagccgacacgatagtgcgggacggagcgaaaacgaactattcacgccgcacaaacagctatacacctaaactgcgttcacaggatatagacggcgacgggataatagatatcccggcgacatcaccgctgccgggatatgaaaatctctcttatcccgagcagatatgcgcagtgcgctggtacagacagaactgcgataaaatacagcttacggcttatacattcatcgacccgaaaaggaactatatgcttaccttccccggaagatgggtaggaatggtaacggcggctgtcaacgcagatgacaacacggtttctttctggaagtatgaaggcgatataaaaaagaacgaatacgcactgctcacaataaaagtcgtgcttaaaaatgacacctcttctcaaagcgaacccgatgtgcagtcggcattgcgtgacggctacagattgttctcggacgacagcgaaaagacgatatattacaaaagcattatgtacgaggggctgtcgcttaccgaagacgaaatagccgcggctctcaaggtacgtccggaaggatacacaagcaatactgcgccgtga

SEQ ID NO: 1019 - DNA, 285 bp, Eubacterium siraeum
  misc_feature: SEQ ID N?2466512
atgacgatcaaaccgttatcggacagagtagttatcaagatgctcgaagcagaagaaacaacaaagggtggcataattcttacaagcgccgcacaggaaaagccacaggttgcagaagttgtagcagtaggtccgggcaagacagttgacggcaagcttgttcccgttcagcttaaggtcggcgacaaggttcttatgagcaagtactcgggaacagaggtcaaggttgacggcgaagaatacacaatactgcgtgaggaagacatcctcgcagttgtagaataa

SEQ ID NO: 1020 - DNA, 1893 bp, Coprococcus eutactus
  misc_feature: SEQ ID N?2466516
atgacagacataaaattcaagctgttctccgcaagaaaaatgaggaagataacaaatatgaaagaagttaaactgcaaaatattgtccttcacaaggaacaggattccaattttctgccttacgcagagctgatgaccaagagtaaagactttacctcgcctttcgtgtatgatccgaagaacaaatgccatatactgcctcagtataagacagctgacttcaagacatattacaactgttttcagctcggaagatggaaagaatacaccaatgcccgcgatttttcgcttgtactggatataaaaggtcactttgccatagagctctatgaaatatatcgtaattccgaaaacatcaattataatcttattgtaaataaaacttatgaaatagaaaacagagagcttatcaaaatcgaaattcccgaaagcaataaaaagctgatcggcttcaaggtagtagctctcagcgatgttgagatatacggcggatattattcttctgacgttgaagaaaaggatatcagaaatgtaaagatctctctggctaccactactttcaagaagcaggactatattaagcataatatagctatgttaaaatcgaaggtattgtgcgaaggcagtgaccttaagggcaatctgttcgttcatgtaatagacaacgaacgtgcgcttgaccccgaggcttacaactgcgaggatctgaaggtgtaccccaaccccaatgtcggcggtgcgggcggctttacaagaggtatgatagaagctatggcgcttcccgaaaagcagactcatgttctgctgatggacgacgacgttatgatcatgcccgagagccttttcagaacattctatctgctcagaattgtcaaggacgaatataaggactgctttgtcagcggcgcgatgtttgactatgatataagagaaagacagtatgaggatgtcggctatgttcataaagaagacggctcatacggtccgcttaagcctgcatttgatatgagaagcatagttgatatcgtacagaatgaaaattattttgataaaaagcaggatagctcatatgccggctggtggtattgctgtattcccgtttctcatatagaggaaaacggtttacctctgcctgtctttgtaagaggcgatgacgtagagttttctttgagaaacaatcccggcttccttacattaaacggtatatgcatctggcacgtcggttttgccggcaagttcaacgccgcaatggagctttatcaggtacacagaaacagcttcgtgatacaggctgccggcggcatatgcaaggatatagatttctatgcaagaatcaagactcagttctggaaggaaataaccagatttgcatataacaatgcggagttacttatcgactctatcgatgactttatgaagggtcccgattggtttatgaaccttgacggcgagcagtcactcaaggagcacaacgccaagaacgaaaaaatggttcctatttcacagcttacagactaccccaacgccggaagagatgatccgtttgaatacaagcgcatcaataagcttcagaaactgttttatatgatgaccatcaacggtcaccttttacccggtttcatgttaaggaactaccctgaggttatttcatatgactggttctttgttccgggcaaaaactaccgcagaaagacacttattgccgtagaccgcaagcacggcacagcgtatgtacgcaaaatgtcaagaaaacgctgctttgcgcttatcaagcgtttcaataaggtaagcaagaactacaagaaaaatcacgctttaatagaaaaacagtattccgataagtttgctcagatgacaacggaaaaattctggaaggagtaccttggaatatga

SEQ ID NO: 1021 - DNA, 1023 bp, Eubacterium siraeum
  misc_feature: SEQ ID N?2466519
atggataagatactcagtattataatcccgtcctacaacagcaaaccgtttttggcaaaatgtcttgattcgcttttatgcgaatgtatcgacaagcttgatataatagtcgtcaatgacggttcaacggacgggtgtgaaaagatcgctgaagaatatgtcgcaaaataccccggctcgataagccttataaacaaggaaaacggcggtcacggctcgggtataaacgtcggaagcgaaaaggcacggggcaagtatcttaaggtgcttgacgcagacgaccggtttctcaccgaaaacatacccgcatttgtaaaggcgcttgaaaacactgcggcagatgtcgttctgacaccgcaccatacaataaatatttcaaacggcgaagttaaaagctggcgttgcttcccgccgcagttcggtaaagaatacactatggacgagataatgactcagtggaaaaactttgaccgcagtctgacattccacggtataacctaccgcaccgacttctacagaagcgagggaataaagatgagcgaaaaggtgttctatgaggatcacgagtatgctacattcccgtgcagtaaagcaaaaagcattttgccgcttgatctgttcatttacgaataccgcataggcgatgttacgcagagcgtgtctgccgaaaatcaactcaagcgcatagggcacaccgaaacagtgcttaaacgtatgaccgcagagggcaaagactttaccggtgcggcttcgctttattgtgcaaagaaaacacatctgctcctgctgagctttcttgttacttccctgctttgcgataaggacagaaaggcaggcagaaaaagagcggatgaaatgatgagctttatggacaaggaatatcatacggtatatgaaatgagcagaaagcactgtaagatattaaagacgctcaacagactgcacataggacttaacggatacaataaaattcttaattcaaagctttataacaaagtaagacacaataagagctttgactga

SEQ ID NO: 1022 - DNA, 1329 bp, Clostridium bartlettii
  misc_feature: SEQ ID N?2466990
atgagaactgaaagcgattttctcggcagtgtcaaactgcccgatgactgcctttacggaataaataccgcaagggcggtatcaaacttcagtatatccggtaaggctgttcataaagagctgatatatgagcttattatgctgaaaagatccgccgctgtcgcaaaccgtgacgcggggcttcttgatgataatatagcacagtacattgtaagtgcgtgcgataagctcagctttaaaattgatatgtcgctttttccgactgacacattacagggcggagcgggtacttctataaatatgaatgtaaacgaggtcgtctgcaacaccgctttgcttattgccggcagaaggtgcggtgattacgactttatagacccgcttgaccatgttaatctcaatcagtccacaaatgatattttcccgactgctgtacgcattgcttcaataaagcttatacgcaagctgagtgatgtgtgtgcacagcttcagactgcgcttcaggcaaaagaacaggagtttgcgcacataaaaaagatcggcagaaccgagcttatgaatgcaacagaaatcactctcggagagcagttcggatcatatgcacagtgtatagcaagggacagatggcggatatataaggctgaagaacgtctgcgatttatcaatatcggaggtgcggcggtaggcaaagcggcgaataacaaatatgttttccgtatgacggagcttatccgcaaggaaagcggtataggtcttgcccgtgccgaatatcctatggatatcactcagaattgtgatgtgtttgcagaagtgtcgggactgctgaaatctcttgcggttgatctgataaagattgcaaatgacctgcggcttatgaacgccgaatttatcggtgaggtaaagctttctcctatgcagaagggaagcacggcaatgccgggtaaagtgaaccctgttatacctgaagctgtaatacaggcggcagttaaagcgatatcaaatgatactgctgttacatatgcttcatctatgggaaattttgagctgaatgcatttatgccgcttattgccgacagctttattgacagccttaaaattcttaccggtgcagtcttgacttttaccgaaaaatgcgttaaaattctcacagccgataaaaatgcctgcggctatcacctggaacacagcagagcgtatgctatgaaatatgttcctgtactggggtacgaagcagtagaaaagctccttgtcgagtgtgaaaatagcaaagagcgtttcattgctcttgccgaaggaaacgcgcaggcgataaacggcaaaggagaatga

SEQ ID NO: 1023 - DNA, 249 bp, Unknown
  BMI gene
  misc_feature: SEQ ID N?2467037
gcgggaggctaccgtgaaagagttaccgccgatttatgtttcccctgtgaagtcggggagatccccgatttcggaaaaggcaagcggcattttatcgtagacgaggtaacagaaaacagtatcagcctttcggtacactgcgccgatccgaaatataacaaaacatggataataaacaagggtgaagaaataacctatcggccgcgctcctttgacggcgggtatttctatgaatttaaactgatttag

SEQ ID NO: 1024 - DNA, 531 bp, Unknown
  BMI gene
  misc_feature: SEQ ID N?2467038
atgtcgctgctgcggcgaccaaacgatctacatgatgtgctatcattatggtgtaaaggaggggcgcatatgaaacccgaaacggtgcttggaataaaacacagagaagaacccacggcaaaattgcaggaatggctaaaggaatatgctgccattgcggcggagtttccgggtgcggaggatttggcacaaaggctctcgaaacgtgccgaaaaagccggtgagctcattacggagcgaaataggccggagccgccctcatcgtcgcacgatgatatgtattatattgaaatggcaaagatcgtggacgatgaaaacgcatcgttcgacggcgattttccgctgggaaacgaagccgacgcgagctttgcaggctgttatttttcggttcccgaactcgcggaaatgcaatgcggactgcatcatctgatcgtcgccgggagctttaacggatataacttcgatgtgctggtacgaaagggatttcttgccgaattatatgaggactggccggaggcggtacgctgctat

SEQ ID NO: 1025 - DNA, 981 bp, Unknown
  BMI gene
  misc_feature: SEQ ID N?2437046
atgagcatatgtgacgaattaaaaaaacaggcaattaaggcaaacgccgggggaatcgacaaatccatcgaaacagcggcggcgtgctttcggctttgcgccgaggggttatcccgattttccgatgacggcggaggaagctacccgatacaggatatttcactgcttattgcctgctcggcggtatcgggcggttggaacatagcgggctctgccgacaaggagcgtatgtctgaaaggctgaagctgtatgtgacaaatctcaacagcctgtgcgatgacctgccgcttgaactgaccgttcccggatatgcgaatatcgggcggaatctcatgttgccgccgcagataacggcgtttaccgaacatctgacgcgcctgttccaaacgcttgacgagcatgaaaaaatggcggtcgtcacaatgcactatttgatgctgtatgcggtgtttgaagaatggccgcaggtggatgtgctgaaagacgcctatgaaaacgccttagttcagccggaggaagcctacgagccgctcgatagcaatacggcgggtattcagtttccgcatacatacgccgctcctacacagccatctgccactgcccttgcccgatatgaacgcaacgcaaagcgccgctggcggccgctgaaaatttaccttattgtaacgggactgtttattgcgttggtgcttgggttatatttttacgccgcacctccgttttctgaaggtcaggagattgtggtaaaggatatcaccggacagtcggtgaaaatgcttccggagtccgagcctgtggagcttgccttggtggggctgacggattataacggcgtcgtccgcctgttttacaaaacgataacaggcattgtgatataccgtatagtgacaatcattgccgtgtttatcgtaaatttactctatcgaaaaaggaatgcgaaaaaagccgccgctttaagagcaggcaattatataccgtaa

SEQ ID NO: 1026 - DNA, 498 bp, Eubacterium siraeum
  misc_feature: SEQ ID N?2467057
atgaaaaaagtagccatagtaatgggaagcgactcggatctgcctatcgttaaaaaagcggctcaggtgcttaaggacttcggagttcctacagagcttcgtgttctttcggcacaccgttgtgccgcagaggtatccgagtttgcaagaaacgccgaaaagaacggcacaggcgttataatcgccgcagcaggcaaagcggctcatcttgccggtgctatcgcaggacagactcccctgcccgttatcggcattccgataaaagcaagcgcacttgagggtattgacgcacttctgtcaacagtccagatgccggcaggtgtaccggtagctacagtagctatagacggtgctgcaaatgcggcattcctcgctgtacagatacttgcggtatctgacgatgcacttatggacaagatgaaagcataccgttcggcacagaccgcaaaggttcttgaagccgacaaaaaaatggagcaggtacttgccgagctttga

SEQ ID NO: 1027 - DNA, 435 bp, Eubacterium siraeum
  misc_feature: SEQ ID N?2467752
atgctggctataggtagcgaccacgcaggatacgcattaaagtgcgaggtaaagaagttccttgatgagcttaaggtcgagtatatcgactgcggctgtgacggagagagagcggattatcctgatattgcggaaaagacctgcgcgaagatcacaagcggagaatgcgacaagggcattctgatatgcggtaccggaataggtatcagtatatcggcaaacaagataaagggtatccgtgcggctttatgccaggattattatacggcaaagtacacacgtctgcacaatgacgcaaacgttctgtgcatgggcggcagggtcataggaccgggtacggctgaggagatagtaagagtgttcctgtcaacagagtttgagggcggaagacacgccgcaagagttgacaagatgatggcgcttgagaataagtaa

SEQ ID NO: 1028 - DNA, 954 bp, Eubacterium siraeum
  misc_feature: SEQ ID N?2467939
atggcacaggaatttaccgtatcgctacaagcaataatcgacgagtgcaagcttgaggtcatccacacaccgcaggatcctgcaaagatattcatttcaaatatcgatgtaaaccgtccgggacttcagctcgcaggattttatgaatattttgataagggcagaatacagataataggcaaggcggaaaccgcgtatcttgaacagtgcggagcagagataagagcacagaggattaaaaaattcttcagtgaacagcctgcggctgtggtagtgtcgagaggaatggagataatgcccgaaatgcgcgagctttcaaaggagcttgatatcccgcttttaagaagtgaagagagcacatctacatttacttcaaagctcgttgcgtatttaagcttgcagcttgctccgagaattacgcgtcacggcgttcttatcgaggtatacggcgaaggtatgcttatcctcggtgagagcggagtaggtaagagcgaaacggctatagagcttgtaaagcgcggacacagacttgtggccgatgatgcagtcgaaataaggaaagcatcgaatattacgcttgtaggcagttcgcccgacaatatccgtcactttatggagctgagaggtatcggtattatcaatgcaagacagcttttcggtatgggtgctgttaaggtaagcgaaaagatagatatggtagttgagcttgagctgtggaatcctgaaaaggtatatgacagaatgggtgttgacaaccactatgtttcgatcctcggtgtaaaagttccctcacttactatcccggtaaaacccggacgtaaccttgccgttatactcgaagttgcggcgatgaacaacagacagaaaaagatgggctacaacgccgcacaggagctgcttgacaatctcggtcttgatatggagagcagtgacactgtaaagagcatgggctga

SEQ ID NO: 1029 - DNA, 1020 bp, Eubacterium siraeum
  misc_feature: SEQ ID N?2467945
atgagttatattataaacctcggcagttggggcagtatttttgcagtgccctcagatgtcgttgacaaatacataaagatagcaagcgggagcagtatcaaggttttgctgtatttcctgcgtcacagcggagaacagctcagtgacacagagatatccgaggcgctttcaatggcggcagaggacgtaaaggacgcgctttcattctgggagcaggtcggactgttatcgcaaaatcacggcatttacgaaccgaagcagggagcgcccgcttcaaagccgcaggggaaagagcctgttatgtctgctgtatcggcgagcgtaacagttccgcagggcgtaacagcgcaacaggctgaattcgccgcagtaaaggcggcagctttacgttcacccgaattttcacctgcagagatcgcggacacggtaaggaaagacgataaggtcgattttcttttcaagacctgcgaaacgctttacggcagaccgcttaagcacaccgagcagaacgcacttataacgatcaccgagcatatcgggcttccgaccgaggtcgcacttatgatggtggattactgcttctcgataaacaaatcatcgcccgcatatcttaaggaaacagcaatgaactggatggaaaacggcataaacgaccttgccgccgcagaaagacagatatcaatgctgcaatctaaaaacatcgccgaaagctccgtcaagtctatgttcggaataaacagggcattgacgcagaaggaaaaggattttgtgaatttatggtataacgtgtggaatttcaattccgaaatggtaaagctggcttacgagatcaacgtcaacgcaaagggtcagttcgctttcccgtatatcagcaagatacttgaaaactggcacacaaagggaataacaactgagcagcaggtaaatgacgaaaagaacagcagaccgatctctaccgagaataattcatcgtttgacgcagaaaaaatcgatgatatgctgcttgaagattatacataa

SEQ ID NO: 1030 - DNA, 990 bp, Eubacterium siraeum
  misc_feature: SEQ ID N?2467946
atggcttatccgtcaaattattatacaaaagcacaggagattatcgacaagcgccgctttgacaacagcgtcacgatagagaaacgaacaagagagctgcgccgcgaaattcccgaaataggggatatcgacagaaagcttagcggtactatcgatgtgctggcaaaaatcatactttcaagaaattccgatgcccgtgaaaaaattgaaaggcttaagaatgaaaatattgcgcttcaggacagaatgagaacactgctcaaaagcaacggataccccgaggactatcttgacccgatattcacctgcaaaaagtgctgtgataccggtatcggcgaacacggcagatgttcatgctataacgatgtgctgaaaatgatagcgtcaagggagctgagtaagagcctgcctatgggacttacctgctttgagagcttcgacctcagtctttacagtgaccagcccaaggcagagcttaagaataagtcaccaagagatataatgaagcagaattatgacttctgcgtttcgtatgcggaggattttcttgtgccgggtgagagcatttttatgacaggcggaacggggcttggaaagacgcacctttccttgtcggtcgcaaagaaggtcatagaaaagaactattccgtggtgtacggctcagtgccggatctgctaagacggatagaaaacgctcactttaataagaccgaggacgatgccgaggtaatgaacacgcttaaggagtgcgacctgttgctgcttgacgaccttggcgcggagtttgagtcgcagttttacgtttcgtgcctttatgagctgataaacacaaggctgaattacggcagacctacgatagtcaatacaaatcttacgggaacagagctgaaaaaacgttatgccgaccgaatagtttcaaggctttattctatgaaaacgcttgttttcagcggtgatgatatcagaatgaagcttaaaaccagacgataa

SEQ ID NO: 1031 - DNA, 1161 bp, Eubacterium siraeum
  misc_feature: SEQ ID N?2467989
atgtttacaagtgcgataatccttgccgcaggaagcggcaggagaatgggctttgacaagatgacggcattgcttcacggcaaggcggttatactgtacagtgtggagcggtttatcgaaagcaacgccgatgagataataatagcggcaagcgaggataatatcaataaaatcaaagagctgataagcaaaaatgtgcagaccgacaaacagataaagatcatcacgggcggctcaacacgctttgagtccgcactgaaagctgtaaaacagacctcggaaaagagcgatgttgtgtcgatacatgacggagcaagaccttttttgactgcagagcttggctgtaatgtcgcacaggcggcatatgagcatggtgcggcgttggcggcagtaagagcaaaggatacgatcaaggtgtgtggtagcggcgaggtgaccgccacccccgacagaagcgtgctatggcttgctcagacaccacaggcggcaagaaaggcagattatcttgcggcggcggaaaagcttgatgtcactgacgcaaggataacggacgatgcatcggtcatggagctgtacggcataaagccgtttatcgttgagggaagctacgacaatataaagctgaccacgaaagaggatatatcaatggcagaatatgttatcggtaaaacaggcgcaccaaagcttcgtgtaggtcacggatatgacgtgcacaggcttgtagaaggcagaaggctgatactttgcggcgtggaagtgccgaataaggataatataggacttctcggacacagcgatgcggacgttgcggtacacgcgcttatggacgctatgctcggagctgtggctctcggagatatcggaaagcattttcccgacagcgatgacagatacaagggtataagcagtatgcgacttcttgaacacgtcaggaaactgcttgatgagaaaaatgcacacgttacaaatgcggatataactataatcgccgaaaagccgaagcttgcaagcttcataccggatatgcaggagagcatagcggcggcgctggggcttgatacggacgatgtgaacgtcaaggcgactaccgaggagggccttggcatagcaggaaatggcatagccgcacacgctgtatgtatggttgaaaaggtcggctga

SEQ ID NO: 1032 - DNA, 498 bp, Eubacterium siraeum
  misc_feature: SEQ ID N?2468080
atggtggctgaaagaaaaagtgtaaagcgtaaagttataactgccgttgtaattgtcggagtatttgtactgctgataggctcgttctttttgagggatatttgtcttagggcagggatcgccgagtgtgaaaagcgtgagatacttcaggtaaagtcgaagtattccgctatacttgacagcattataagcacaggtactgatattgccgagtataaaattacagccgctcacggcggactttttgaaaagtcggtcataaaggctgatgaaaacggcgagccgctttatgataagctgacggaggagcttgatgtattgtgccatacttactgttacggcgtagaaaagcaggataatgcagtgcgtttcagcttcaacagcggcaatacaaaacagcttgtctattcagcgacggatatttccgacagcgaaacttcatcgctcggtgataactggtactactatgagaaagtaatgacagccaataacggctga

SEQ ID NO: 1033 - DNA, 867 bp, Eubacterium siraeum
  misc_feature: SEQ ID N?2468310
ttgaatattaaaagaaaattagcggcgatcctcgcaggaataacagcaataacagcattctcaggctgttctatgctcggcggtcagacaacaaacgcactcggaagctatgattttacagaaatgaatcttgttcagcttgacaagcccgcagacggtcaggacgttgcagtaatagaaaccaatgtcggtacaataacagcggtactctatgccgagtttgcccctaatacggtagcaaactttaagaagcgtgcggaggaaggcttctatgacggaaagccgttcttcgctttgcaaaagggcatttatgcaataacaggcgcttcaaacgatgaaggtacggaaggcataaccgatgacggtaagtacatcgaaaacgaatgctccgtaaacctgtggcctttcaagggtgcgcttttaggatacagcacacagcagggctattcagacagccgtttcttctttacaggcgctcttgagataaccgaagaaaacaaaaaggaactcagaggctatacaaatcaggaaacaagtgctcaggtaataccggaagagcttataacggcatttgaaaaaagaggaagcgttcccggttttgcaggtgcttacaccgtattcggtcaggtgataaacggctttgacgtgcttgataagatactctggaccgattcggacaagtcaaacatgaagccgcttgaagatctgaaaatagtaaaagtaacgctcgatacctataaggatggaaagttcgcaatagaagagccgacatcggataagtatctttctgccgaagaaatcgctaaaatccagaacgaatcaaacagcacgacaagcagtgtaaccgaggcaacatcggcaaactga

SEQ ID NO: 1034 - DNA, 945 bp, Eubacterium siraeum
  misc_feature: SEQ ID N?2468311
gtgaaaggaaccgataaaatgaggtttaagtctttattcaaggctgcggcggcggtaacgctggcagcagctataataacagcaagcggctgtagctcacagaaaaaggataacaccgcagagataactgtaggtccgggcgacacacttgccgaaatgacaatacagataggcgaggaaacaggcaagatacgcttcaagcttttcccggaggtcgctcctaagggcgttgacaactttgtaaagcttgctcaaagcggttattatgacggcaagactatccacagagttatcaaggactttatggtacagggcggctcactcagaggaaacggcacaggcggaactaccgccgataagaccgcaattccgcgtgaaacgaacgaccgcatgagagcgtattacggagcactcggatatgccgaaggcagtgacggcatcaacagccagttctttataataaataacaagacacctttcgacatagcaaaaactgccgagaatatctcgtcagaccttaacgaatacaaggacagactgaaggaagaggacaaaaagacatacaccgactacctttcaaagctcaatgcgactcccgatgatgtaagggcaaaatacctctcaaacggcggtgtattcagcatcgacggaaactacacaatattcgggcaagctattgagggacttgattttcttgacaagataagcgctgttgaggtttcttccggaaacacaatagacgatgaacaaggtattgcgtcaaagcccgccgtttcggtgataataaagaaaatcgagattgcgactatcccgacaataaccgaaaccgaggctactaccacaacaagaaggagaatcagaccttctgccgcaacgacccctgcggaggtcacgacagcggctgaaactcccgctcccgagtcctcaacaaccaagtcggaataa

SEQ ID NO: 1035 - DNA, 1551 bp, Eubacterium siraeum
  misc_feature: SEQ ID N?2468584
atgtgctttgtagcctgtccgcagaacgcaaagcagataagaaacgatgtaaataaagcaaaagagcttatcaacacgggtactcccgtgtatgtcagcatcgctccgtcttttgtcgcaaactatgacggcgttggcataaactcaatcaacgatgctcttaaaaagctgggctttgccggggcggaggaaaccgccgagggcgctcagcttgttaccgcacagtatgaaaagctggtagctgacggcgagcacaagataataatcagctcctgctgtcacacggtaaacacccttatacagaaatactaccctcaggctctgccttatcttgcacaggtgaaatcgcccatgcttgcacacggagagatactcaagaagaaatatccgggctgtcacaccgtattcatcggtccgtgcctttctaaaaaggcagaggctgacgcatatgcgggcgcgatagactgcgtgctcacattcgaggagcttacgggctggctcaaggaagaaaatattgaagtctgtcccatctccgacaatgccggaagaagcgacagagcaaagacaaggctgtatccgacaacatcgggcattctgcgctcgatgaacaaggacaaccccgaatatctctatatggcgatagacggcgtggagaactgccgtaacgctctgcgcgatattatagacggcaacgtaggaaagtgctttatagaaatgtccgcctgcatcaacagctgtataggcggtcctgctatggataaaaagcacgagggcgttatccacgaaagaagagctgttgatgagtttgccggaaacggtaaattcgacacaacagagctttccgatatgacaaaatcgctccccttcatcggcgttcagaagactatgccgggaagtaaagcgatagaggagatactccgcaagatgaacaagagcgatccctcgcaggagctcaactgcggaagctgcggctatgatacctgccgtgaaaaagcggtagctatactgcaaggcaaggcagatcttacaatgtgtctgccgtatcttaaggagaaagccgagagcttctcggataatataatcaacaatacacccaatggcattatggtactcagcgaggatcttgaagtacagcagataaacaaggcggcgcgtgagataatgaatatcaagagcctgtccgatgttatgggctgtccggttgtaaggatactcgaccccgtatcgtatcttgaggttatgaacacgggtgagaatatccacaacaagcgtacatatcttgccgagtacggaaagtatgtcgaggaaacgataatatatgataagagctatcatatcataatgtcaataatgcgtgatattaccggcgaagagatatcaaggtcaaagcgtgaaaagaacgccgccgaaaccatcgcagtcaccgacaaggtaatagaaaagcagatgcgtgttgttcaggaaatagcatctctgctcggtgaaacgaccgccgaaacaaaggtcgcactgacgaagctcaaggagaacctgtcaaatgatgaacagtaa

SEQ ID NO: 1036 - DNA, 801 bp, Eubacterium siraeum
  misc_feature: SEQ ID N?2468682
atgctaactcaaaaggagatgagatatacggatatattgattatattgctgataccgcttgcagggacaacactcggcgcgctgaccgtattttttatgcgtgataaggtgagcgctaaaaccgaaaaattattgctcgggtttgcgtcgggagttatggtcgcggcttctgtgtggtcgcttctgataccgtctatggagctgtcggtcgatacatacggaaatttaaactggatacctgctgtggtcggctttgcggtcggaatacttttcctgctggggatagacagtcttgtgccgcatctgcaccttgacagcgataagcccgagggtgtgcgaacgaagctttcaaaaacgacaatgctgctgcttgcggtcactattcacaatgtccccgagggtatggctgtcggagcagcgtgtgcgggagcggcaggcgaaaccatgacggtggcgagcacttttgcgctggcactcggtatagctattcagaattttcccgaaggtgctgtaatatccatgccgcttaaaggtgagggtatgaaaaagggcagggcgttcgcgatgggggtactgtcaggcgttgtcgagccgataggtgcggtagcaatgatactgcttgcttctttcattgctccgcttttgccgtatatgctgtcgtttgcggcgggtgctatgatgtatgttgtgatagaagagcttataccggaggcgcagagcggtgagcacagcaatataggaacgataggtgcggcggcagggtttgttgttatgatggtgcttgattgtacgttggggtga

SEQ ID NO: 1037 - DNA, 222 bp, Eubacterium siraeum
  misc_feature: SEQ ID N?2468743
atgtcgatgaaaggagcggaactgatggatatacaggtcggcgatacgctgaaaatgaaaaaagaacatccgtgcggcagcaaagaaatgctcgtactgcgtgtcggtgctgatttcaaactgaaatgcgcaggttgcggacgtgagtttatgacacctcgttcaaaatgcgaaaagaagataaagtcagttatccgcaatgccgttgaagaagaaaaatag

SEQ ID NO: 1038 - DNA, 1260 bp, Eubacterium siraeum
  misc_feature: SEQ ID N?2468838
atggaatttttcaatattgacagcagactgctcgaaaccgcaaagaaagccgaagagcttgcctcggcgcagtttgcaaaaatcagcgaaaccgcagagtacaacggaaacaaggtactctcggcattcataaacaaccgtgtcagcgaaatgcaccttaaaggcactatcggatacggctataacgacgatggcagagataagctcgacatggtatatgccgaggttttccataccgaggacgcacttgtccgtcacagctttgtaaacggtacgcatacactctccactgccctgttcggcatactccgtccgaacgatacactgctctgcgtaacaggcgcaccctatgacacgttgacagaggtaataaacggcgaacacggcggctcacttaaagagttcggtgtaaagtatgcgcaggttgatctgctccctgacggtacgcccgaccttaacggtataaaggcggcagccgcaaagggctgtaaggtggcatatatccagcgttcgaggggttattcgctccgcgagtcgctgtctgtagacaagataggcgagataatagcggctgtaaagagcgtaaacaatgacgcaattataatggtcgataactgctacggcgagtttgtggaaaagcgtgagcctaccgaggtcggcgcagatcttataatcggcagtcttatcaaaaatcccggcggtgctattgcccgcacaggcggctacatagcaggcagaaaggatcttatcgagctttgcagctaccgtctgacaacagtcggaacaggtaaagaggtcggctgttcactcgatgagaacaggggtatgtacctcggcttcttcttagctccgcagatagttgaaagcgcggtaaagacatcggttttcgcctgcacattcttctcgctgctcggttatgaaacattcccgaagtacgaccatgacaggacggatataatcgccgcgataaagctcggcacacccgatgcgctctgcgcgttctgcaaaggcattcagggcggatcgccggttgactctatggcaactcccgagccgtgggatatgcccggatatgacagcaaggtcataatggcggcgggtgcatttacaatgggcgcaagcattgagctttccgcagacgcaccgctgagagaaccatatgccgtatggctacagggcggtatcacctatccgtccggcaaaacaggaatattacttgccgcacaatcaatgcttgaaagcggcgaactgaaaatataa

SEQ ID NO: 1039 - DNA, 492 bp, Eubacterium siraeum
  misc_feature: SEQ ID N?2468881
atgaagcatactatatcaatacttgtagaaaaccacgccggtgtgctcgcaagggtcgcgggacttttcgcaagacgcggtttcaatatagacagccttgcggtaggtattaccgaggatgaaaaaatctcccgtataacaattatcgcagacggaacggcttataccttagagcagatcgaaaaacagctcaacaagctgatagacgttatcaaggtacgccatttgcccgcagaggagcttttatcaagggagctcgtacttataaaggtagcttgccagccgtcacagagggcagagcttatttcgctcgccgagatagcaaaagcaaaaatttccgatataacggtaaatacgatgacgcttgaattatccgacagcgttccccgtataaagacgtttgaggagcttttacgtccgtacggaataaaggaaacggtccgtacaggctcaatagcaatgcaaaaaggcggggcttctatgaagctgtaa

SEQ ID NO: 1040 - DNA, 1632 bp, Unknown
  BMI gene
  misc_feature: SEQ ID N?2468882
atggcgtcagaaagaatgacggttgcaagagctatggtaaaagctctcgaggcggagggtataacaacagtattcggttatccgggtgcggctatatgtccgttttatgatgagcttataagctcaggtatacgccatatacttgtgcgccacgaggtcaacggcggacacgccgcaagcggttatgcgcgtatgacaagaaaacccgcagtcgcaatagctacatcgggtccgggtgcgacaaaccttataacggctatagcaaccgctcacatggacagcatacctatggtccttatcacagggcaggtaagctgtgaacagataggacgggatgttttccaggaggcggatattacaggtgctgccgagcctttcgtaaagcatagctaccttgtaaaaaatcccgaggaaatgccggttattttcaaaaatgcattttacattgcaggttcgggcagaccgggtcctgtacttattgatatgccttttgacgtacaaaaggcggagatagattttgaatatcccaaaacagtggatatccgctcttacaagccgagtgttcagggcaacaagctgcagataaagcgcgctgtcgccgctattgaaaagagcaaaaagccgcttatctgtgccggcggcggtatctttaccgcaaatgccgaaaggctgcttgagcagtttatgcagcttacagatattcctgttgtaaatactatgatgggaatgagcagtgttcctgccgacaatccgttgttctacggaatgataggtatgcacggtgtaaagagtgcgaactatgccatcaacaactgcgatctgttgatacttctcggtgcgagagtcggtgacagagcagtcaccgcaataagcagacttgagggtgcaacggtaatacacatagacgttgacccggcagagataggcaaaaaccttgcagcaacaatacccgttgtaggtgatgtaaagaacatacttgagcagctgcttgaatgcgcaaagaattacgaccattacgactggaagcaggagctaaacgaggtaaagaaaacacaggacaagccgatcgaagccgagcccgagggctgtgtaaatcctaaggctttcataaggcttctcggtcagaagctccccgataattccgtggtaagcgccgatgtcggacagaaccagatatggactgtcaataacataggactcaggaacggcagatttatcacatcgggcggcatgggaacaatgggctactccgttcctgcggcgctgggtgcaaaggcagcgtgccccgacagcgaggtcattgcgatatgcggtgacggtagcttccagatgcagttcatggagctcgcaacaatgatacagcatgacattgcggtaaaagtaatcgtcatgacgaacaatcgtttaggtatggtaagagagcttcagacaaacggttatgacaacaggcttacagcggtattccttgacggaagccccgacttcataaagctcgcagacagctacggcatacacgcgcagagagttaccgatatagccgatgcggacaaggcaattgacgagatgctctcgtcaaagggctgttatctgcttgaggtcagagtagccgaaaacgaaaagactatactgtaa

SEQ ID NO: 1041 - DNA, 558 bp, Eubacterium siraeum
  misc_feature: SEQ ID N?2469208
atgacagtagcagttctcgcgcttcagggcgcatttgcagagcacgaaaaaattctctcaaagctcggcgcagacagctttgagatacgtcaaaaaaaagacctttatcgcagcttcgaccgccttataattcccggcggcgaaagcacggtgcagggaaaactgctccgtgagcttgacctatttgacagcataaagagccgtatcgaaagcggtatgcctgtctatggcacctgcgcaggtcttatcctgcttgcaaagtcgatttccaacgacagcgcacagcatttacagacaatgtctatcgttgccaaccgtaacgcttatggcagacagctcggcagtttccatacggatgcacagtttgacggtatcggagaaattcccatgacgtttatccgcgcaccgtatatcgacaaagcttatgacgatgtgcaggttctctcggaggtggacggaaaaatagtagccgcaagacagaaaaatcagcttgtgacagcttttcaccctgagcttgacggagatacaagagtacatgagtattttctgtcgatgtga

SEQ ID NO: 1042 - DNA, 657 bp, Eubacterium siraeum
  misc_feature: SEQ ID N?2469269
atgagagaaacatttgagcataagctcggcaagctgaataacgatcttatccgtatgggcggtatgatagaggaggctatagcgtcatctatcacagcactgcgtgacagtgatactgagcttgcaaaaaaagtagtagacggcgacagacaggtagatgaggaagagaagaacatcgaaagtcagtgcctgtcgataatacttcgtgaacagcctgtcgcaagggatctgcgtaaggtttctgcggcgctgaaaatggtgaccgatatggagcgtatcgccgacaatgccgcagatattgctgagatcagccttacagccgatgtatccaccattatgcatatagtaaaagagatacagactatgagcgaaaaggttataataatggtatctcactctatcgactcatttgtaactacagatatgacgcttgcaaatgaaacgataaaggcggacgatgaggtcgatgacctgttcatttcaataagaaaccgtatagtcgagcttataaagagcgagcattgcagcggcgaggtagcggtcgatgccctgatgatagtaaagtatcttgaaagaatagccgaccatgctgtaaatatctgcgagtgggtggagttcttcaagacgggtgaatataagaatacccgtattatataa

SEQ ID NO: 1043 - DNA, 771 bp, Eubacterium siraeum
  misc_feature: SEQ ID N?2469961
atgattcaggttaaatcggcaaaagaaattgaaataatgaagaaagccaatcagatagcggctgatgctcttatcgttgcgggcaatgcaataacgcccggaatgagtacatgggagcttgataagatcattcatgattttatcgtatcaaagggcgctatcccctcatcactcggttacggaggctttacaggcagtgcctgcatttcagtcaactccgagctgatacacggcagtccttcaaagaagaagatcatcagagagggcgacatcgtttcagtcgatgttaccgctgagatcgacggtttcaacggtgataacgcctatacctttaaggtcggcaaggttcccgagagagccgaaaagctccttgaggtcactgaggctgctttgtacgagggtataaagatggctcttcccggtaacagaatcggcgacatttcaaatgccgtgcagacttattgtgaatcaagaggctactatgtagtaagaaagttcatcggtcacgggatcggacacgatatgcacgaggaccccgaagttcctaacttcggcaagcccggcagaggtccgcgacttgtaccgggaatggcgatctgcattgagcctatgataaatgaaactacagctgagatccgtatactgcctgacaaatggacggtggttgaggcaaacggtaattacagtgcgcattttgagcacactatcgcaataacaaacggtgatccgcttattctcacggaaagctcgcttcaccacccgaagaaataa

SEQ ID NO: 1044 - DNA, 744 bp, Eubacterium siraeum
  misc_feature: SEQ ID N?2470527
atgtactcacggtgctttttcggtgaatttacggaggatataatgttaaaaaagcttaacaactacttcacaacctttgaaaaaatactatggataggctcgatagtgctgataacaggctcggctgttatgttcggcaaagacgggatactatccgtcatagcgtcgcttataggcgctacctcgcttttgctcaatgccaagggcaaccccataggacaggctctcggcgtgattttcagcatactctatgcgataatctccttctcgtttgcctattacggcgagatgataacctatctcggactcacaggacctatggcgcttgccgcctttatcagctggataagaaacccgtttgcaaagggcaaggctgaggtaaaggtaaatcatatccacaggggcgaggttctctttatgttcgtgcttaccgccgttgtaaccgtagttttctacttcgtgctcgactttttcaacacggcaaaccttattccgagtaccttgtctgtcacgacaagctttcttgcggtatatctgacattccgccgcagccggttcttcgccatagcctatgccgctaacgatataatacttatgatcctctggtcgctcgccgcactgaccgatataagctatatctcggtcgttatctgctttgttattttctttgcaaatgacatatacggctttgtaagctggagcgcaatgcgaaaaaggcagtcggctgaaacggcattgcagtaa

SEQ ID NO: 1045 - DNA, 996 bp, Eubacterium siraeum
  misc_feature: SEQ ID N?2470554
atgagcgtaactataaaggatgttgctaaggctgcaaacgtttcggtagcaacggtttccagagttcttaataaaaagtccaatgtgtcagaagaggctattcaggcggtaaacagtgctgtacaggcgctcggctacagcccgagctttctcggcagagatctcagaaagagcgaaacgagaagaatactcgcgataatcgcatcgacagagcagagcttctattccgatgttattagaggtatggaggttgccgctttctcgcagggttatgatgtattgatagctacaacgcatgatgatccaaatcacgagatgcacttactcggtatgctgttttcaagggcggtagacggtgctgtgctcctgggacctaagcttgatgccgctactatcaatgcgcttggcgaaaagcacaatatcgcaatgtgccttgaacgtcttgataactgtaatgttcttaccgttacaattgataatgtcaaggcgggtcgcgacgcggtaaattaccttatccgcaagggacacaggaagatagggctcatcacgacattgcagagaagccagtcaagcatcgaccgtgagataggctacaagcttgcgctcaaggacaacggcattccctataacgaagattacgtttatttcggcggctatgaaacagagcagggtatgagaggctgtgagtatcttatgaatttacccagccctccgacagctatattctccatatcggatattattgctatcggtgctatgaactatgcgctttcaaagggctacaggatcggcaaggatcttatatttatgggctttgacaatatccagtactcacatatgttcgtgccgcacttgtcgacagtagagcagccgtgttatgcgcagggcaagctcgttatcgaaaagcttattgagaacatgaaagcaactgcacctgaccataatctttacacgttgccgcatagtcttgtgctcagagagtcaacgggcgactga

SEQ ID NO: 1046 - DNA, 450 bp, Eubacterium siraeum
  misc_feature: SEQ ID N?2470563
atgcagccgggcgaatataatattgtctgcgaggcgtggatagtaagcggtaacaagctgctcgtgacacagcgctgtaagtataagaatttcggcggtctgtgggaatgcacaggcggtgcggtcaaggccggagagtcaagtattgactgtataaagcgcgagatcaaggaagagatcggtatagaagttaccgatgaagagctgactttcaagggcactaagcacggcgcggctttctttatcgattgttatgagcttcacagaaatcttacacttgaagatctgacacttcagaaagaagaggtatcaggggctaaattcgtaacacttaccgagtttgagaaaatgcaaaaagagaaaaaactgataccgggactttttgattttatgacagaactggaatttggctttgttacaggaagaaactatttatccgaaaggaaatga

SEQ ID NO: 1047 - DNA, 852 bp, Eubacterium siraeum
  misc_feature: SEQ ID N?2470657
atgaaagcaacaacaaaacgcacgctgatcgatattacggtcattattatttcaagcttcatattctcctgcggtcttaagacctttaccgctccgaacgatatagcaccgggcggcgcatcgggaatatgcgttgcgctggctcatattaccgggcttagcgaaggtgtgctttactttattgtaaacgttccgcttatagtgataggatttatatttcttggcagaaagctgatgttcaagacactgctttcaattgtcactattactattgcaaccgactatgtattcgcttatcttccccactacgagggaaacgaaatgctcgcagctatattcggcggactgcttatcggcgcaggtttgggtctttgctactcccgtgaaggcacaggcggcggcactgatatcctgaaccggctcatttacaagcgctttccgcatatcagcataggtgctataaccttcacgactgattttgccgttatagtgttcgcaacacttgttttcggcaagattgaatcggctctatatgccataatcgctatcttcgtatcatcaaaagtgatcgatatcatcgtatacggaagctatgagggcaagatgctgctgatattcagtgacaagtccgaagaaattgcgaagaaaataatgaacgcaggcaaaggcgttacattcctcagcggaaagggcgcatacagcggtgaagacaagcaggtcatctgctgtgcggtaagaaaaaacgactatgttaaagtcaaacgttatgtgaaagaagtcgatcaatcggcttttatgataatcacgagcgctaaagaagtgctcggaaaaggtttcaaagagataaattga

SEQ ID NO: 1048 - DNA, 402 bp, Eubacterium siraeum
  misc_feature: SEQ ID N?2470658
atgatgtatgaaattatgacgactgccgaagcgaaagcgctcggaggccttacacttgcattcttcggtgacagcgtatatgaggtattggtgcgcgagcagattgtaaagctcggcacaatgcctgttgataagctccataaaaaagctgtacagtatgtaaatgcaggatttcagtcctatgcgtatgatgtgatagcagatgagcttaccgaagaggaaacagagatattcaaacgcggcagaaatgccacaggaaataatgtcccccgctcttcaaatcctaaggattatcgcagagcaacggggatagaggcgcttttcggatatctgtaccttacagggcaaagcgacagaataaaagagctttttgaaaagatctatacgagcgagcgtacataa

SEQ ID NO: 1049 - DNA, 1086 bp, Eubacterium siraeum
  misc_feature: SEQ ID N?2470796
atggaaacattcagtaatcttattgatcttgacgcatattcacccgatgagtggaatatgatagttgagcttgcccggcaaattcagaagaatccggcactttaccgttcaagatgcagcggaaggataatgggaactctgttttatgagccgtctacaagaacgcagatgagctttcagactgcgatgctgaggctcggcggtacgataataggatttgacaacccgtcaacatcttctgtttctaaaggtgagaatatcaaggatacgacaaaaatagtaagcagctatgcggatatactcgtaataagaaatccgtatgagggcagtgcaaaggcggcggctttaactgccgattgtccggtcataaatgccggtgacggcggacatctgcatccgacgcagacgcttacggatatgctgacactcaaaaatgaaaagggcagactggatcacctgaagataggtctttgcggtgatttgcgttacggaagaacggttcattcacagcttaaagcgctgtcacgctatgagggtaacgagtttatcctgatatcgaccccggagcttgcactgccgtcatatataaaggacgtgcttaatgcaagaggctgtacatataaggagatctactcgcttgatgaagctatagccgaagaatcgctcgatatgctgtatatgacgagaatacagaaggagcgctttgcaagcgaggaagaatacaataagcagaaggacgtattccgccttgataccgaaaagatgaagaaagcgccgaaggatatgatagtgctgcacccgcttcccagagtggacgagatagcaatggacgttgatgatgatccgcgggctaagtacttcacacaggcaaagaacggaatgttcgtgcgtatggcgcttataatatccgtgcttgagggcagactgggcgcacctaaactgctcaccggcacggtaaagaatgatgttgaatgcacaaaccccaagtgcatcacaaagaccgagcattatctcccccacagcttcaaggtacagggcgatatatgcgaatgtgaatattgtgacgagcgtattctgctcgactaa

SEQ ID NO: 1050 - DNA, 996 bp, Eubacterium siraeum
  misc_feature: SEQ ID N?2471706
atgtgcgccgctgatttcagagccgcctgcaaaaaggcgggactggctttaacagtcatattcgcggcacggtgtgcggctgatgcggtaactgcgctcatcggggcgcttatggctgactgcgatgcgcagataacgtcttcggtgcaggcgctcgcgggtatacttatactgtatgtgctggcgatagcggtcacatcaaagctgctcggatatcactttgacggcaggctttacaagaaacccaaaaggctcggcaaggctgtatcgtggttcgtaccaatgtacggagcgggtcaggtggcaaacattgcggtgatggcgatatctttttttatagtacaggatcgctcggcggttcaggatacgctcgcaccgatagtgtcaaaggggcttgggcttggcggctggtatcttgcttttctgtttatacaaatggcggtgctggcaccggtgtttgaggaatactggttcaggggagttatacagtcctcgcttatgccctacggaaacggttttgcgatactcgtttcatcgctgtgcttcggaatggcgcacgtcaatatacatcagttctgctatacggtgatagtaggcatatgtctgggctatgtcagatacgcgaccggcagtcttgtgccgacaatgataatgcacgcgatattcaactctattgcaggaatagcgatcgtggctgtaagcagtgaaacttttatatcggcgtttacgcatattcagcagggcgaggggcttacaggcggcgaacaggcgtttatgacagcgctgatgatttaccttgctgttatactgataatagctgtagtcggcattgcggcggctatagggaagcttaagaacaatcgcctttaccgaccggtaaacaactatcccgcgcttaccaaaaagcagaaattcatcgctgttacaaaagaacctttgtttattgcgggatttattctgtgcacggcgtatataatagctatgatgattatttaa

SEQ ID NO: 1051 - DNA, 2685 bp, Unknown
  BMI gene
  misc_feature: SEQ ID N?2471750
atgataaatacgattgatataagcggaaagtgggagctttttataagcgaaaaagagctttcttcaataccgacagattacagtgacagtataactttgcccgatacgctttcaaatgccgcaaaggtggctgagaacaagaacaatgacgagggatacctcacagacaaatacacctttacaggctatgcgtggttcaggcgttcgcttacgcttgagaacgatatgacaggctttgtatcggtgctcacactggaacgcacaagagtcagcacactgtacatagacggtgcagaggtgggtacttgcgacagtctttgcagtacgcaccgctatgacatttcttcatatatgaccgcaggcacacacgagatagttatccgtattgcgaatgtcggctataagacaggcggcggtcatatgacaagccccgatacgcagacaaactggctcggtattgtcggaaagatgaatattgagatctatcctaagagctatatttccgatgtaagggttatcgcatcggctgacggcgctttatcggtaagaggctgtgttatcggcgcagataacgccgacattatggcaaccgttacagcgcctgacggaatacgcgtgttaaaggcaagtataatcgctgacggcgatacgtttgaagctcagttcaagcttgaaaacgctcagctctgggacgagtttgaacgcaatgtttaccgcctgactttgcagtgcggcgaggatatctacaacactacattcggatttgtcacattttcgcatatcgacagaaagctgcttgtaaacggaagcgaatcattcctgcgaggaaagcatgacggacttatattcccgctcacaggttacgctccgtgcgatgtgaatgagtggaaggagcgcctgaaaatcgctgtgagctatggtataaaccactatcgcttccacacctgctgtcctcccgatgccgcatttacagccgcagatgagctcggcatatatatggagcctgagcttcctttctggggaacgatcgccgcaaagggcgaggaaggctacaatgaggaggagcagaactacctcataaacgagggtatccgcataataagggagttttcacatcacccttcatttgttatgatgtcgcttggaaacgagctctggggcagtcgtgaaagacttggagagatcattgatattcttcgccgtgaaaatcattcgatctatttcacgagcggttcaaacaacttccagttctggcctgccgaaattccacaggaggacttcttcgcaggcgtaagactttcgcgtgacagacttttcagagggtcgtatgctatgtgtgatgcacctctcggacatatccagaccgacaagcctaataccgttcacgactatgacgcaataatccgcggtgagaacggctcggagaacgagggcggcggtacgatacagatacagtacggtacaggcgtaaagaccgtcaagcttaacgccgcagacggaagctatattccgcacaagcccgtgatctcacacgaggtcggacagtatgattacttccccgactttgacgagatgaagatgtacacaggcccgctcaaaccgcgttatcttgatattttcagagaaaggcttgaggaaaagggactttatacacagtggagagatttctttgaggcagtcggcgcacattgtacgcagtgctataaggacgagatagaaacggcgttgcgttcttccgaactcagcggcttccagcttctcgacctacaggacttcaacggtcagggcgtatcacttgtcggtgtgctcaacgcctttatgcagtcaaagggctttataacgcctgaggactggcgcggcttctgcgacagcaatgtcctgcttgcaagatttgacaaatatgtttacggggcaaaggaaaagccggttatagaaattctcctttcgtcctatggcaagaataagataaagagcggagcagttaagtattcactcataagcgatgagcttgatataagcggcagtgcagagttcacagcttccgatacgcgtcttacttctgtcggcacatttactcccgatttcagcggtattacaaagccgcagacagcagttctcacacttactctcggggagcttcacaacagttatgtattccggctctatcccgattgcaatgttgaaattaccgaaaacggcataaagacggcagacgatgagctgatatttgttggcagtacagaaaaggcaaaagagcttatcgcaagcggcaaaaaggctatggtcataacagacggcagtaaagctatcgaaaacgcatactgcgccgatttctggaactatcatatgttccgtgtcatttcggagagtatgaacaagcctgtagcgcccggaacgatgggacttcttatcgataaggacaacaagcttttaaatgatttcccgtccgaaaaattcacaactccacagtggtacgaggctataacgcacagcaaggctgatatacttgatgatgaccctgaaatcacgcccatagttcaggtcgttgacaacactgagcgttgccatcgtcttggtatgctgtataagaagaacggcgttcttcattgcagtataagactgtgggaagcggctgactgccccgaaataaagcagcttgcaaagagcattacggaaaatttctga

SEQ ID NO: 1052 - DNA, 1479 bp, Eubacterium siraeum
  misc_feature: SEQ ID N?2471751
atgttcttgtcggttgttatatcactttgtacgggaatttctctttactgcggatatgcgcttatagaaggcgggcaaccgatcatagcggaaatatcatcgccgcagttgactgcaacacagtccgcagaagaaaaagagccgctttcactgccgctccctgttatagtatccgtcgatatatccgacactatcaatgatgattttacccgtaccataaaatttaaatgcaaaaataacgatgacactgaaaacggactgcgttattatatttccgataaagaacagacagatagcgttgatacggacaattggagcacaacgactgacggagaagcagaagctgatctttccgggggagagtattacgtttatgtcacaaatgacagcggtgagcttacaaagagtgacaagataacggtaaaagtcgacgcggtaacctcagtcgaaataggcaagaccgatacatatatgaatgtcggaatgaattattcgctgtgcgcgcaggtggatactgtaggcaaacccggtgataaagaaaaggcggtcacatggaaaagctccgcgccgcaaacagtcagcgtaaatgacggagtgatctccgcactgaaagcgggcaaagcgactgtaacggcaactactgcgagcggactgtcggacagtgtggaaattaccgttacagacttgctcagagcaccgaaaataacagcttataagccgcttttaccggcaggacagtacaccgaggaggagggcgcgctgatcgatgcggtgcttgaaagccgcgttaataccgcaggttacggcacgagagccggagtagtagcggcggcaagatttattccgcttgaatttaattacaagataccgtatttttatgaaaacggcagacttgacccacagcccgaaagaccgtattgtgacggcgagggcagattttatcacaagggtctttatcttactcacagcaagtttgagcttcttgacaaaaagggtatattgtacggacctgcaacgtggggcgaaccgctcacaaactgggaggacgcattcgggcttgttcccggcgcaaagtatgcaaacggaatgacctgttcgggatttgtttcgtggtgtctgtataacggcggcgtaccgctgggtgatgtcggcgcgggggatacgcccgattatgactatgaatattccgattttggaaaacgtgtatggcttgacgaggatgtaatgcgaagcggaatattgcaggtcggcgatcttataggctgcgacggtcatattgcgataatagcaggctttgacgagaacaatatctacatagccgaggcgctcggaaaaggcatagttatggaggttcgcgagcgctaccgcgaggtatgggagtgcggcgactatacctatgcgatgcttatgggtgatatctatgcagagcataacggcgacggcgatgttaccgagatgtgggctgactattctgagtaa

SEQ ID NO: 1053 - DNA, 1035 bp, Eubacterium siraeum
  misc_feature: SEQ ID N?2471898
atgagcattgaaaagaaactctggggcagtcacaacggcaaggactgctacttattcacgcttgaaaacggcaatatgaaagccgagatcacaaactatgcaggctcgcttgtaaaactgatagtacccgataaggactgcgacaagggcgatgttttgcttggctatgatacacttgacggttatgttgccggcacaagcagtcagggtgcgctggttggcagatacgcaaaccgtatcggcggtgcaaagttcacacttaacggcaaggagtatacccttgcgaaaaatgacaacggcaacacgctccacggcggaaatatcggcttcaataagaaagtatgggaagttaaggattacggcgatgacggcgctccttatgttgtgttctcatacactagcgttgacggagaagagggtttcccgggcactttgacgcttgatgtaaagtatactttaacgactgattctgttgagatatgctataatgcggtgagtgataaggataccgtaatgaatttcacgaaccactcatattttaatctcaacggcacagatgcaggagatatcaaggatcatattgcacagatatttgccgataagtacactcccgtaagccctgtacttatacctacaggcgagatagcaagtgtaaagggtacgccgtttgatttcacctctcccaagagaatcggcgaggatattgacagcggcaagctccccggcggatatgaccacaactatgttttaggtgaaacaaaggaaatgagaaaagccgcagaggtttattccgaaaagaccggcagagtaatgactacttatacggatatgcctgctatacagttctatataagcggtggcctgggtggagaaacaggcaagggcggtaaggaaatgttcaaaaatcagggcttctgccttgagagccagttctgtccggactcacccaacaagcctcagttcaagccgacttgcgtgtataaggcaggggaaaagtataactttactaccgtgtataagttttcggtgaagtaa

SEQ ID NO: 1054 - DNA, 2592 bp, Unknown
  BMI gene
  misc_feature: SEQ ID N?2471899
atgaattattacagcgaagaaacagaaaaagtcctgtcagaactcaaaacgagcaaagacggactgacaagagaggaagccacagaaaggcaatgcagatacggcaggaacgagatagcggaaaagaagaaaaaaggtgtactgcaagtatttgcggagcagtttgccgatcttcttgtcataatacttatcatatcggcgctgatatctgtttttacaagcaatcttgaaagcgcaatagtaatcatttgtgttatcactatgaatgctgtactcggaactatccagcatttcaaggcggaaaagtcgctggaagcactgaaatctatgtcatcacccaccgctaaggtcatgcgtgacggtaatgtctgtatcatagatgcggctgacataacagtaggtgatatcgttattattgagcagggagatatagttcccgcagacggaagaatgatctcggcggcatcattgcaagtgaacgaaagctcccttacgggtgaaagtaatggcatagaaaaaatgacgcagatactgaccggcgacagcataccgctcggtgacagaaagaatatggtttacacaggttcgctcgttaccgcaggcaggggaatgtttgccgttacggcaacaggaatggctacagagcttggcaagatagcagggctcataaataccgcagagcgcaagaaaacaccgttacagcgcagtcttgacaagttctcaaagcagctgtcgttagttatccccgtactgagtcttatagttatgatactctatattgtcagaggcactcccatacttgattcgttgatgtttgctgtagcacttgcggtagcggcaataccggaggcgttgagttccatagtcacaatagcgcttgctatcggcacaaggaagatggcagagcaaaacgcagtaataaaagatctgaaggctgtcgagggactgggttgtgtatcggttatatgcagtgataaaacaggtactctcactcagaataaaatgacggtaaggcaagtgtatcttaacggtagggaagaaaacgctgacgcttcggcttgtaatgcgggttttgatgttcttgaaaaagcgatggcattatgtaatgatgccgcatattcagacggaaacgccataggcgaccctaccgaaaccgcattgtcggatctgatcggtgttacggcttacgaaaagatccgttcggattatccgagagtatcagaaataccgtttgacagtgaaagaaagctgatgagcacctgccatatgatcgacggcaagcgtacaatgttcactaaaggtgctaccgacaatttgttgccccgtttggtttcggtgtgcgataacggtacggtgagaggcataaccgataaagataaaaaggatattgcttgtgctaatgagcatttttccggacagggaatgagagtgcttggttttgcttataaagtcactgaaaacagttccgtcgacactgaggataattatatttttataggacttgttgcgatgacagatccgccgcgtcccgagagcaaggcggcggttgcggattgcataagagccggaataaaacccgtaatgataaccggtgaccacaaagtgacagcaagtgcgatagcacgggaaatcggtataatgcgtgacggcgacataagtcttgatggggttcagcttgatgcaatgaccgatgaggagctggatggcatgatcgaaaaagtttctgtttacgcccgggtatcaccggataacaagataagaatagtagaccgttggcagagtaaaggcaagatagttgcgatgacaggcgacggtgttaatgatgctcctgcactgaaaaaagcagatgtaggtgttgctatgggtataacaggaacacaggtatcgaaagatgccgcttcaatgatattgaccgatgacaattttgctacgattatcaaatcggtagctaatggcagagcaatctatgcaaatatcaagaatgccgttaaatttttgctgtccggcaatcttgcggcgataatcgctgtattatgtacggctataccgggacttcccgcaccgtttactgcggttcagctcctgtttataaatctccttaccgactcgcttcccgctattgccataagcaccgagagagccgaccgctcactgctttcgcaaaagccgcgtgacagtaaatcctcatttctcacaaaggctatgtctgtacgcatagttgccggtggcgtgcttatagcgctcgctgttatgtcggcgtattttatcggttcggctgtttcttcgggacttgcgtgtgcgatggcatttacaacactgtgtattgcaaggcttttccacggttttaattgtcggggggataagtcgcttttcagccttggaattactgccaataagttctcactgcttgcgttctttgcgggaatagtccttttgtgccttgcagtattcgttcccggagtttcggatctgttcggaactaagattatgaatatctcaaatttcggaataacgttactcctgggctttgcaccgacgtttctgatacagacggtaagagtgataaaagaggcttttgccaaaaagaaataa

SEQ ID NO: 1055 - DNA, 1251 bp, Eubacterium siraeum
  misc_feature: SEQ ID N?2471924
atgaggagtgatgatatgttccgtgatattctccactgcgatatgaacaactttttcgcatcggtagagtgcaagctgcaccccgagcttaaaggatatcctgttgcggtgtgcggctcggtgggagagcggcacggcatagtccttgccaaaaacgagcttgcaaaggcaaagggcgtaaagacagccgaaacagtagcatcggcaaagtcaaaatgtgccgggcttatcacagtgtcgccgcactttgaggaatattcaaaatacagcaatctagcacataagatatacgagcgctacaccgaccttatcgagccgttcggtatggacgagtgctggcttgatataagcggcacaaggagattgttcggtcctcccgaaaaggtagccgatgagatccgccgtaccgtaaaagaagaactcggtcttacgatatcggtcggggtatcgttcaacaaggtgtttgcaaagctcggaagcgatatgaaaaagcccgatgcggtgacagtaatacctcgcgagtcgttttgcgaaaagatatgggacttaccgctcagcgatatgataggcgcaggcagagcaacaacatcaaagctaaacggctacggcgttttcacactcggtgatcttgcgcggtgcaacccggactggataataaaactgctcggcaaaaacggctatatgctgtggtgctatgcaaacgggaatgacaattctcctgttcaccctgtcgatttttcaatgcccgcgaaaagtgtggggcacggcgttaccaccactgccgatattgcccgttgcgaggacgcaaagccgatacttcttgagcttgcgcaggatataggcaaaagacttaccgcacagaaaaaatacgcattgaagatatcggtcaacgcaaggtcaagcaaactgcaaaatacctgttggcaggccgatcttccgatcgcaacgcgctctcctatgataattgcagataccgcatataggctgttctgcgaaagctacgaccgtataaaccctgttcggtcgcttaccgtgaccgccttttcgcttgtcgacagcgggacggtatgccagagcgatctgtttaccgatactgcaagacttgacaagatggaaaaggtagacagctgtatacttgatataagaaaccgcttcggtgacggaatgataaagaacgccgttctgatgtcgggtttagccgtgcctaagtcaaaagctgttgtgtcattgccggggagtatgctgacgtga

SEQ ID NO: 1056 - DNA, 1602 bp, Unknown
  BMI gene
  misc_feature: SEQ ID N?2472094
atggcaaaacccgttttactcgttgttatggacggtgtaggcttttcaaagacaggtcttggcgacgcagtcacactcgccaatacccctacacttgacagacttttaagagaatgccccaacacccgcttaaaggctcacggtgacgctgtaggtctgcctacagatgatgatatgggcaactcagaggtaggtcacaacgcactcggctgcggtcagatctactcacagggcgcaaagctcgttaacgaatctatcgaaagcggaaagatgtatcagtctgaagcatggaaggaactcgttgacaactgcaaggctaacaacagcaccctccacttcatcggtcttttatcagacggtaacgttcactcaaatatcaagcacctgttcaagatgctgacagaagccaagaacgagggcatcaagaaggcaagagtacacattctgctcgacggaagagatgtacccgctacttctgctcccgtatatatcgaacagcttgagagcttcctcaaggaacttaatgccgatggcgctttcgatggcaagatcgcaagcggcggcggacgtatgaaggttactatggatcgttatcaggctgactggcctatggttgagcttggctggaagactcacgtcaagggcgagggcagacagttcgcatcggctatggaagcggttgaaacctaccgtaaggaaaacgacggcatcatcgaccaggatctccccgcattcgtaattgccgagaacggcgagcctgtaggcaagatagttgacaaggacagcgttatcctcttcaacttcagaggtgaccgtgctatagagctttcaatggcgtttgatgatgacaacttcacagcattcgacagaggtgcaaagcccgatgtatgcttcgcaggtatgctacagtatgacggcgacttaaagctccccgcacgcttccttgtaaatcctcccgagatcacaaacactctcacggaggtactggttgccgcaggtcttaacgaatatgcagtatccgaaacacagaagtacggtcatgtaacttacttctggaacggtaacaagagcgataagttcagcgaagagcttgaaacatacaaggagataccctccgacaacgtttcattcgatcagcgtccctggatgaagtccgccgagataacagacgatcttatcgaggttatcaagagcaagaagtatgactttatacgttgcaactaccccaacggtgatatggtcggacacacaggcagccttgactctacaattatcggtgttgaagctgttgacctcggcctttcaagacttatcaaggtttgtgatgagtacggtgttacactcgttgtaacagccgaccacggtaacgcagacgagatgcttgaaaagaacaagaagggtgaggttcaggtaagaaccgctcactcgctcaaccccgttcctttcatcatctatgataaggacgttaagtacaccatcaaggacgatacaaagtatgctcccggtgtagctcccaagtacggtcttgctaatgtagcgcctacagtagtaaagatgctcggtcttacagcacccgattgctggcaggaaagcatgatctaa

SEQ ID NO: 1057 - DNA, 672 bp, Eubacterium siraeum
  misc_feature: SEQ ID N?2472146
atgatacttcagccgatagacagaaacgaagctctgcgttatctcggctgtaaggacggcacggataacgagcagatgctcacaatgctcgatttatgcgaaaaagagcttttaaaagccgcaagtccgaaatatctctatgccgtttacccgataagctttacgaatgacggtgtcagaatttcggacagcgatatattacttaaaggcagctcagccgccgctcatttaaagaactgcgacaggatagtgcttatgtgcgccacgctcggacagggagtagatgtgcttttaaggcgtttgcaggtatcggatatggcaagcgcagttatcgttgacagccttgcaggtgcggcgatagaacaggtctgcaacagggcagaaacagagatatttgaaaaagtaaaatcaaacagccgtacctggagatattctcccggatacggtgacttgccgcttgacatacagtttgatttactgacgcttttacaggctcagaaaaggataggtcttactgtaatgaacagcaatatgatggtgcctacaaaatcggtaacggcatttatcggactgtccgagggcgaggtcgacagaagtacaagaggctgtgaaagctgtaatatgaaagacagatgcaaattcagaaaaagcggaggtcactgtggaaattaa

SEQ ID NO: 1058 - DNA, 1110 bp, Eubacterium siraeum
  misc_feature: SEQ ID N?2472541
atgaaagcaattataaaaataattacggtgtttgtcacggcgcttgtgatgcttgccgtgccgttttgtgcgggcgcacaggacagcacgatacttgacggctacagtgccgacataccgcaggagcttgatcggcagctgtcggcggcgggaataacaccgcaaagcatagacagtaatacattgtcgctcgataaggtggtaagcaatgtaacaggtatgttatgggacagcatacaaagtccgcttaagctgcttgtgtcacttctcggcattacgcttctttgcagtgcagcaaatgtatttgccgataattccggcaatcttaagaccgtgttctcggtggtatcggtacttgcgtgcagcactcttacagttacagctgcgagcgactcactggcggcggcatcaaagacgcttgagtcgggcagtgtgttccttgcaagctttatccctgcgtttgcgggaatactcgctacaagcggacacgtcacatctgccgcaatgttcaataccgtggtaatgggcggcgcacagtgctttactcagcttgcgtcaaagatacttatgccggtgtctatgagtatactcggtgtatcgcttgcagggagcgtgtgcagtgagcttaagctgtcggcgcttgccgaagcggtaaagaaaacagtgatatggatactcggacttattatgacgatattcgtggcactgcttgcgatgcagagctttatcacagtaccgtcagacaatgtcgggcttaaagccgcaaggttcactgtgtcgaatggtgttccgttcatcggcggtgctgtgtcagattcgctgtcggttatgtacggcggtatagggcttatccgtaacaacttcggcgtgttcgggataatagtcggcggggcgttgatactgccttcaatattgtcggtgctgtgctataagcttgcgttttcggtggcggcggcgttcagtgacctgttcggtatatcacagctctcggggcttctcaagtgcgccgagggggttagctctataattatggcgatgctcgtatcgttcctgctgatggcggtaatatcgatatctcttatgatatttatggcgggaggtgcggtatga

SEQ ID NO: 1059 - DNA, 1173 bp, Eubacterium siraeum
  misc_feature: SEQ ID N?2472571
atgcacgaaaagatcatatcggctgtgatatccgcagccttcgtacttatgactgctgtgccggtatgcgcacaggaggaaaacaagctttgctatcttgaaaataccgataaagcggagtttgaggtgtctgccgtaagcgctattctgatagaagcggataccgcaacggtactcttttcaaagaatgaaaaggaacacagacagatagcaagcactaccaagataatgaccgctctgctcacccttgaagcgggagaaccagacaaggaatttcaggtcgactctgcggcgataaaggtagagggtacttctatgggactgcgtgagggcgataaagtaacacgcagagccttgtgctacggtatgctcctgccctcgggaaatgatgcggcaaatgcggcggcggtgaatatttccggcagtaaaacagcttttgcaaagcttatgaacagcagagcaaaagaaatcggcatgaacgatacgaactttatcacgccgtcaggacttgatgctgatggtcagtattcgtgcgcatatgacctggctatgcttgcacgggaagctatgaaaaacaaggattttgccgaaatatgcgctttatccaaagcaaaagtatcatttggcaatccggtaagtgaacggtggctcgtaaattcaaacaagctgctgacaagctatgacggctgtatcggcgttaaaacaggctttaccgacagtgcaagaagaacgctggtaagctgtgcggagcgtgacggcgtgaagcttatcgctgtgacactgaacgccccggacgactggagcgaccacacgaaaatgcttgactacggctttgaaaaggtaaagatgtgtgatttcacctatgataccacagaactgatcttgcctgtgataggctcggataaggaaacggtcggcgtaaagtgcgacagcgtaaaactgccgctgtgcgatgaacaaaaagaaaaggtaacggtgaagatttacctgccgggatttgtctatgcgggattatccgcaggtgacaaggtcggagaaatatgctatgagcttagcggcaaaaccgttgccgcgacagagcttacagcggctgaaagctgtgttcggatagagcaaaaagccgatatttttaccgtgatatataaattcattgcggggctactcacccggtga

SEQ ID NO: 1060 - DNA, 609 bp, Eubacterium siraeum
  misc_feature: SEQ ID N?2472574
ttgaattacaacgaatcactttgtataatcgaagctctgctgttcgcatcgggcgagccgatctcgcttgacaggctgagcgaagcaagcggtatcgagccggaaactgtagcaaagcttatcgatcagcttgaaagaagatacaatgtttccgacagtgcgataagagtattgcggcttgaaaattcatatcagcttgcgacaagggaagaatatgcaccttatataaaacgtgcaatggaaaacaagcgtcaggcaaggctttcgcctgcggcacttgaagtgcttgcagtggtagcctataatcaacctgtcacaaaagcctttgtcgagcaggtcaggggcactgacagctcaggcgttatcaatacacttgtggaacgtgaactgctgtatgaggcaggcagacttgaactgcccggcagaccgataacatacaagacgacagataactttctgcgttgcttcaagcttgaaagtctggcacagctgccaagtcttccggacgaggacggtcagctgaacttaaatgagctcggcgcattacagcaggatgcggattacggtgatgatagcgatatcggtatcaatgagaacgacgaggaataa

SEQ ID NO: 1061 - DNA, 2331 bp, Unknown
  BMI gene
  misc_feature: SEQ ID N?2472576
gtgtttttactgggctggagcgacggaaaccgaataaggatagaaaacacttacggagtgcatgacggcatttttgcggtacaaaatcctgataagcttaaaggcctttccgagatcaccgacagcggtgttatcacagtcataggaagcggcattaaaagcgaggaatactcgggcagaccgataactgtaggttatgctgacagcaatgcggttttgttgaaccgaatagccttacaggagggcaatttccctgataataaaagcgagatcgcaatcgagcgttcatttttaaatcttgtttatcccgatgcaaagctcggggacaaaataggcttttatctgaatgaagaatataccgagcttaccttatgcggcatattgaacaatatttcaagccttcaatgggacggtttgccgcctatgataaacgcacttgtgcataacaccttcagtgaaaacaccgcttactgttttgtaagcgtaagctttgcggacggtacggatatatcgggttactcggaaaaactgctcgaaaacggcactgcgggagctttctgtccgaataagagcagtgcggatctgtcggtgatatcgggaataagcaacattagcagtgttgctgttctttgtgtgattatgttcgtatttactgtcattatcctgttttcggttacggctgtatccgtaagaggaagctcaaagcaaatcggcagacttaaaatcatcggattttccgggcgggctatctatggtatctttctgacaaagaccgcgatcctgtcactgctgtcgtcaatactcggcggtattgcggcattttcgctgtcttttgtgatctacggctcgttttcggcagaaataagtgccggacagactgcgcttttatgcatagcgggagtgtttggcattttcgtattttcaatgctgttcggcgtggtcggaatacgcaagacagccgatatgacagttatagagtgtcttcgtcccgtgcaaaaagagatcaatactccgaaccgggctttcacctgcaaaaatccttatattctgtattccgtaaaaagctttgcacaaaattccggaacagccgtctgtgcttctatagccgcttttatctcgatagtggcaatagtgctcggcttatatatcggagaagctcttaaaacagagatcagctcatatatgcgaccgtatgattttcaaattaactttaatacaagcaatatgttgcaggctctgacagtaaattccgactcgcttgacggtctttcaaagaccgattattcggcgctgtgcgaaaacccggataccgcggatatgatcggtatggccacaatggaagcttactcgctcacaactgagcctgttgcagattatgacagtgaggaggcaaagcaggagcttatggctatggcatctgctgccggctatcccgagggatattatcttgctaatgagttgctgtgcggagtcagcgacagtacgctttcaacgctcaacgactatgtgattaaaggcaagatcgacatcgatgccttgaaaaacggaacacagataattacaagcggtgacaaatacgccccgggggataaaatacgactcgcggcggttataaacgatgtaaacaaacagggagaggacgcaaaaagaatgctcgactttgaggtcacggtcggcgctgtcttagacctcggcacaggcgaaaactctcttatgaaacagctgctttacggatatatatggtcgatagacgcatatagcgcacttggacttgacgcaagctacaacagggtatacctgacggtaaaggataaggacaactactcgctcattgcgggtgtgctgaacgacatatactctcactacaaagcgcagggtatgtaccttagtatcacggacgttattcagcagacaagctcagcacagcaggtatacgactcgtttgtgacagtttcacgcatattttgctttacgttatgcggtttttcgataattgcgcttataggttcgctctatggcagactgtgggggcgaaagcagatattcggtatgttaagagcagtcggtatgacaaaaaatcaaatgctgaaattactgctgtgtgaaaatctgaccggtatcggcatcgccgttattctcggcatagtgataagcggcggagcttgcgttgcattcggaattttgtcaaacgcaccgatcacaatgttcccgataaccgatgtcgcggtacttgttctgatctattctgccgcggtgtgtttaacctgtcttacagctacaaataaattcttcaaaactactgtagcggaaaatgtaaggggatatgagtaa

SEQ ID NO: 1062 - DNA, 528 bp, Eubacterium siraeum
  misc_feature: SEQ ID N?2472579
atgatatcagtatatctttctcttatcgaaacagataaagaaaaatcgcttatcgaagagctatatgacaaaaataaacagactatgtacagtatagctttcagcaatctgcataacagaaccgatgcggaagacgctgtacatgaagcgatacttagggcgataaatcagattaaaaagctctctcagatctcgcccgacaatcagcgcgcttatctgaatgtgatagtgagaaacatatcgtttgatatgttcaacaagaagatcaataatctttcgttggatgaagatacggaaatatatgatgaaaccgttcttgaagatcaggcaatcggaaatgtaaattatgatctattggtcgattttattcgttcaatgccgcagggtatgcgcgatgcaatgtatctgaaatattgccttgattttaccaacgaggaaatagagcaagcgctgaatatcagtccgtctgcactcagaaacagattattcacggcaagaaagagaataaaggattatatcagaaattag

SEQ ID NO: 1063 - DNA, 1341 bp, Eubacterium siraeum
  misc_feature: SEQ ID N?2472598
atgaagatcaaaaagcgtattatcgcctcggtattatcggcgatatttatattctgttccgtatcgctgcctgtagcggcggcggcagacccttattcatgggacggcacaagtgcacccgcagcagggagaacgtattacataaaaaataacataaccctcagcggcaacataaaaatacctaaagataccgttatggtggtgcttgcgggctcatctgtcaccgtgccatacggtaagacccttgacgtatcgggaaacctcgttatagacaatggcgcttcacttataacaatgggcgcgctgaaaaccgaaagcggctcacagctgagtgttgacggcacattctcttcgggaggaaaatcgacggtgacaacatcgggaacggttctcatttccgaaacagcacagaccgcttttaccggaagtgtcagcataaattcgtcattcacgtcatacggcgagatcagcctgtcgggcaagacgacattcggcggcacttcatacatagacggtaaatttgaaataatgagcggctgtgaaacggtaaacaagggaagcctgacgctcggagcggattgttcatataagctcggcggtatgttcaacaacagcggaagcggaagctgtacggataaccgcagagcgacagacacctcggcaatgtcggtagaaacgatctcgctttacacgacagacgcactgacaggaattgacgtttcgtgggcgcagggcgacacggtagactgggcaaaggtgaagaagtcgggaatagactttgcaatgatccgttcaagccgtggcaggataagcgatgaatatcctatgacgagcgatacatatttccatcgtaatatgaaaggtgctatgcagaataatatacctgtcggagtatatcattactgctatgccgaaacggtgcaggaggcaagggacgaagcgaagtttgtactcagccttatacgcggctatgatgtaagctatcccgttgtatttgacatagaagaccagtggtacataaaaaacggctactcaaaacagacgctgacctcaatgacagaggcattctgcgaggaaatagcaaatgcggggtatataccggtggtatactcctatgcatcgttcttaaacagctatcttgatatgtcggcgctttcaaaatatcccatatgggtagctcacgttgacaccgacaagcccgcatacagcggcacctatttcctgtggcagtattcgtggaagggcagtatcagcggaatcgacggcgatgttgatatggatcactgctatgtcgactttgatgcgtatacaaggaagttcgggctgaatgggaggaagtaa

SEQ ID NO: 1064 - DNA, 789 bp, Eubacterium siraeum
  misc_feature: SEQ ID N?2472697
atgctccatggtgcatactgcccgatctacggcttcggactgataatcgtcatcgtatgtctgaccccgataaaggattcgtggctgttgctgtttgtcggctcggcggtgcttaccaccgtactcgaatttgtcacgggctttgtacttgataagatattcggcaggcgatggtgggactacagcaacaagaagctcaacatcggcggatacatttgcccgcagtttaccgttgtgtgggggcttgccagccttgctataatgaaggtcattcagcctgctgtgggatttgccgtgggacttatctggaagccactcggcatagtcattctctgccttttctatgcggcaatactcacggacgttatactgacattccccgaggtaaagaagctcaggaatgagataaggcttattgatgagcttgaaaaacagctcacagcggtatccgatgccataggctcgggtctgtccgataagacttcacaggcagttgaattttcaaaggagcatggaattactcccgatgaaatgcagaagaaagccgatgagctgaaagcaaggctggaaaccgcctcagacagtgtaaagcaacgcaacagcgaacgtataagtgagcttaaagacagtgcggcggagcgcagagaagagcttacggcgcgatttaatgagcttaacgaaagactgtccgagcttaaagcaaagcacaagcgtttgtacaaggcattcccctcactgaaagagggcagagcgaagctgaaaaaagcagtgcaaaacaggaaaagataa

SEQ ID NO: 1065 - DNA, 1206 bp, Unknown
  BMI gene
  misc_feature: SEQ ID N?2472807
atgggaaaagcattgataataggagccggcggcgttgccggagtagtagttcataagtgctgtcagaacagcgatgtatttaccgagatctgcattgcgagccgtacaaagtcaaagtgcgacgcgctgaaaaagcaggtcgaggaaaagggcacaaagacaaaggtaacaactgcacaggttgacgcagacaatgttcccgaactcgtcgcacttataaacaaggaaaagcccgatattgtaataaatgttgcgcttccttatcaggatcttacaataatggacgcttgtcttgaaacaaagacagactatgtcgatacggcaaactacgagcaccccgatacagccaagtttgaatacaagtatcagtgggcgtatagggaaaagtttgaaaaggcgggcatcacagcgcttctcggaagcggatttgaccccggtgtaacgggtgtgttctgcgcctatgcacagaagcattactttgatgagataaactacatcgatatcctcgactgcaacggcggcgatcacggttatccgttcgctactaacttcaaccccgagataaatatccgtgaggtatctgcaaagggcagttatatcgaggacggcaagtgggtagaaaccgaacctatggagataaagagagagtacaactttgagcaggtcggcaagaaggatatgtaccttctgcaccacgaggagcttgaatcacttgcgctcaacatcaagggtatcaagcgtatccgtttctttatgacgttcggtcagagctatcttactcatcttaagtgcctcgaagatgtcggtatgacatctatcaagcccattatgtacgagggcagagagatagtaccgctccagtttcttaaggcagttttacccgaccccgcatcgctcggccccagaacagtcggaaagacaaatatcggctgtatctgcataggcaagaaggacggcaaggaagtacactacaaggtttacaactgctgtgaccatcaggaatgctacaaggaggtcggctcgcaggctatcagctacacgaccggcgttcccgctatgataggtgcaatgatggtaatgacaggcaagtggaagaaacccggcgtctacaacattgaggaatttgatcccgatccgtttatggacgcactcaataagtgggggcttccgtggaacgaaacatttgaccctgagctggttgaatga

SEQ ID NO: 1066 - DNA, 2754 bp, Eubacterium siraeum
  misc_feature: SEQ ID N?2472809
atgagcttttttgataaagacggcaacagccgccatgattggaatatatttctggataacttccccactataggtgtatttaaacttccgcacgacctgaacgaagcatactatgacaaaaacgttgccgcaatgcttcatatcagcggcgacaacatgaataaagaaaagttttacgctctgcttgacagtctgaacgaaaatcaggtcgagggtcacaagaatatatatatgtatactgccggcggagaaacaagctacataaagataaagatagtatatgatacagactatctgctcggctttatacaggacgtaacgcagataatgcaggcgcgcaacccgaaggacgatatcaaagagtatgacacgcttacgggtatgtacacacgcgactacttcatacgccgtgtacgcagtatgataagtcagataagcggcaccgctcaatgctgtatggcggctgtacatatcaacggtatagaacgtgtagacagcgagcttaattatgataagacatcactttgcattgccactgcggcaaacgcacttaaacgttttaattccgaaaatgtcatcataggtgtgaaaagctacaaagactttttagttttcttccgccagatggcaaaaaaagaaattaacgatattataaagaaaatgtacgatgcagtcagcaggtgcagactgaccgatgaatttggaaataccatagaaacccgcagtgaagcattcactataactgtaggctactgctggtatcctacgcaggcggctactatcgatatgatgataaactatgccgactttgcacttttcagagccaaagcgctcggaagcataaacagggagttttcggcagaagaatatgttacggagtgcaacagctattccgactcaaagcttctgacgagccttattgacgacaacaatttcagttactgcttccagccgatagtatcgaccgttgacggttctgtttatgcctatgaggcgcttatgcgtcctaagggttcgtcgccgctcgatatactccgcattgcacgcgagcacggaaagctgtatgacatagagcggcttacttttgagaatgtccttgatatagtcagcaagaaccgttcgcgtttcggagaaaaaaagatattcataaattctgtgccggaccatatgataacagagtatgattttaacagactgtgcgaaaagtacggcgatataatgcctcagctggtaattgaatttacagagcaggcggatcttacagatgaaaagatagcaaaactgcggcagctgttcaaatcacacggctgtatgatcgcgatcgatgattacggaagcggttattcaaacactgcggcggttctcagtctgcagcccgatgtattgaagatcgaccgctcgcttattacagatatcaatacaaacgtcaaaaaacagcacttcctgacaggaattatcgattttgcaaggctgaataacattaaggtccttgccgagggcgttgaaacatatgacgagatgagcgttactatacgcagaggtgcagactatatacagggcttctacacggcaagaccgcagaaagaaatcgtccccgatatatcggatactattgccgagcagatgagaatgctcaatatgcaccgtcccaatataaaggtagctcgatattataccgtaaaggacggcaaaaacgaaaaattagatattgaaaaaatgctttccgagcgttacacaggagttatagtcgaaagcgcttcggttcatcttacggctaacggctgtgataatgccacatttgtgataaagaccgaaaacggttcaaaatgcaggatcacacttgataatgtgaatatcaagagcggtatgcgtcagtgcatacagataggcgaaaattccgatgctacaatagagatcaaaggtcagaacacacttaactacgacggtatacttgtacccgacacagcaaagcttacaataaccggtgacggaagtctttatattgactcatacagaaatgacggctgttgtataggaagcagttataacgatactttcggagaaataacgatagatatgaccggcagtattgagatgcaggcaaacggagatcacggtatctgtatcggcggcggtgtgtcatcaagcgaaatgccgataaaactgctgggcggcagcataaatatgtcatcgaccggaaaagactgcataggcgtgggctcatatgatggaagctgcggcatcgaaacaggcaacgccattatagatataaactgttccggcgacaacgcggtagctctcggctcactgtgcggatatgtggatataagaataaacggcacaaagctcatactgagagcgcttggcatacgtgcaggttgcgtgggcgcgctctctgcgcttgacggtgataatccatcaagtatagatatccgtaatgcttcattcgatcttcttatgaaggcaatgcgcggtgcggctgtcggctgtcgcaagaccgaatgcaacataaatataaatagctccgactttaaaattcatatcgaaggcgaacaggttgccggtataggcagctctgagggaaaaggagctctgtgcgccgcaggaagtgatatacagatcacttctatctcaggcacttattcggtagatgtaggctttacaaacggcaagactgctcttaataacacaacgataaattcagctatgataaacgaccccgactatcatgagcctgtacgcatgatacaataa

SEQ ID NO: 1067 - DNA, 651 bp, Eubacterium siraeum
  misc_feature: SEQ ID N?2472906
atgagatataaggcacttatttttgaccttgacggtacacttctgaacacaatcgatgaccttggcgacagcgcaaatcacattttgtgcaaattaggatttcctacccacacaatcgatgaatataaatatttcgtcggcaacggtataccgaagcttatagaacgctgtctgccgtccgacaggcaggaatataaggaacaggcgcttgccatgtttatggaatattatgctcttcacagcgaggacaagaccgccgcttatgacggcatacccgagcttttgagctccgcccgcgaaaagggtatgaagctcggcgtgattaccaacaaagcgcataacatagcacagcaggtagttccgcacttcctcggtgtcggtgtgttcgactatatcagaggacttgatgacaggataaaggcaaagccgtgcccggacggcgcgcttgacgtagcggaaaagctcggcgtacagccgtcagaagtactttacataggcgacagcggcgttgatatgcagacggccgtaaacgcaggctttaccccgtgcggcgttctgtggggcttccgcaccgaaaaggagctttgcgataacggcgcaaaatatatcgtacataagccttctgatattcttgacataacagagaaatga

SEQ ID NO: 1068 - DNA, 1050 bp, Eubacterium siraeum
  misc_feature: SEQ ID N?2472958
atggaaaaccgtacactcagaatccttgaagcgatagttgacgaatatatacgcacgggtgaggcggtcggctcaaagcttattgccgagaagcttgacaacgcggtatcgagtgcgactataagaaacgagatggcggcgcttgaacagcagggctatcttgaacatacgcatacaagctcgggacgacttccgacatatcagggactgaggctttatatagaaaaggtaatgtcacctgcacagttacccgaggaagaaaaagaagagatcgaccgtatatttgacaatatcggcggagcgacagacgatgagataatcgacaatgcgtcaagggcgcttgcggatatcacaaaatgcgcgatagtttctaccaacaccgtaaacaagttttcggtcataacaaaggtagacgttatcccgacaggcaagagaatgtacgttctgcttctgataacctcagagggcaacataagaaacagggtttgcagactgagctttgatcttacgaacgagcagatggagttcttcacgcagttcgtaaatgagaacctcaagggtgtaaatcttgatgagctgtccgatgaatacatcgataagctgacgcaggctatgggcggatatatgatgacgttatcgccacttctcaaggcggtagttgatatatcggctgaaatgcagcagcaggtggagctcagcggagagaaaaatctgctgacctgttcggatttctcaaacactcagatagcaacgatacttgacggcaagaacgagctttgcagctggcttgacgatacattctcgggcatacagataaagttcggtgccgaaagcgatacatttgccgttaccaattccagtctgatagcggcaagcttcaacaaggacggacgaaaggcaggcactttcggagttataggtcctgtaagactggactacaagaagctgatcccatatattgaatatttctcgtcaaaggtcaccgatgcattgtcgggcggcaatgacgaagaagcaaagaacgaagaaaaggaggcggattcagtttga

SEQ ID NO: 1069 - DNA, 945 bp, Eubacterium siraeum
  misc_feature: SEQ ID N?2473100
tatgaaaaggtaaagaacacggtagtcctcgtatataactatcagcgtcagacaggttatgcagagcctgtcaaatacggcagcggcagtggtgttgtgttcacatcggacggctatgtcatcactaacgaacacgttgttgagggtgcggataaaatgacggtagtcgctcccgattacaagaacccggataatacaaaagaatatgaggctaccgttgtcggcagtgatacttattcagaccttgcggttctgaagatcagccgtgacgatccgtttgagtatgctacactcggcgattcggacacagtaagagtaggtcaggatatctgcgtactcggtaacccgaagcagctgcttaactcactgacaaagggtatcgtttcgggacttggcagagcttctgcgtcaaacagtgcgtacggtacaagcacaatacagatagatgcggctataaacagcggtaacagcggcggcggaccttttgatatgtacggaaacgttgtagcaataatcgactacaagctggtttcaaacacacaggcttctatcgataacattggctttgcgatcacaattaacgaggctaaacccgttatcaatgaccttatgactaaaggatatgtcaccaaccgtcccggtcttggtatcaacggcgaagagataagcgaatacagcgcatatatgcagggtcttgaaagcggaggcgtatatgtaacatatatctcaaaggatatgccggtggcaaagagcgatcttaaagtcggcgatataatctcaaaggtaaacggcactgcggtttcatctgtaacagatatccagaatatcatagcagagcttaacataggcgatacggttgagctgactgtttacagagcaagtgcaacaggcagatatactacaaaaaagatcagtgtagagcttgcggagattgagcttaactga

SEQ ID NO: 1070 - DNA, 1203 bp, Eubacterium siraeum
  misc_feature: SEQ ID N?2473121
atgaaatacgcagtattactttgcgatggtatggctgatcttccccgtgaggatataggcggcacacctatgagtgttgctcataagcctaatatggacaagctcgcaaaggtatcaagagtaggtcttgtaaagacggtcgaggataatttaaagcccggcagtgacgttgcaaatctttccgttctcggttatgatcctgcaatatattattcgggcagaagtccgttagaggcgggcagtataggcattgatatgaagcctacagacgtttctttcagaacaaaccttgtaacactgtcagatgagcctgtgtatgaggacaagactatacttgactactgcgcagatgatatatcaacagaagaagccgcagagcttattaagttcattgatgaaaagctcggcacggacaaattcagattctacagcggtgtaagctaccgtcattgcctgatatgggatcacggtacgaccgatattggcacgctgactcctcctcacgatataacaggcaaaccgataaagacacacctcggtgtaaacgaaaacggtaagccgcttattgagatgatgaagaagagctatgatctgttgaaagaccaccctgtaaacttaaagagaatcgaaagaggtctgcgccctgcaaacagcatatggttctggggcgagggcgtgcgcaaggagcttactcctttcgccgaaaagtacggcaagagcgccgctatgatctctgcagtcgacctgctcagaggtatcggtaagttcacaggtatggacgttatcaaggtcgacggcgcaacaggctacatcgacacaaactttgacggtaaggctcaggcggctgttgacgcactgaagagcggcaaggattttgtatatatccatgttgaagctcccgatgaatgcggtcatcgtaatgaggttgacaataaggtaaaggcaataagccttattgacgaaaagatactcggcaagctgcttgatgaattcaaggacgaggatataaaaattcttatctgtcctgaccatcccacgccgcttgaactgagaacacatacaaatgctcctgtgccgttcatgatatatgacagcagaaagaagctggacggtgttgattgcttctgcgaggagagtgcggctaagactggcgattatattgctgagggtcatacccttatgagcagtttcttggctgactga

SEQ ID NO: 1071 - DNA, 678 bp, Eubacterium siraeum
  misc_feature: SEQ ID N?2473157
atgagaatgagaagaaaaaaatatctcgatgagcgccttgatgcctgcagtgccgtaaatctaggctggcttgtcgactatgccgccgaacaaagaggtgaaacacagcagagaacgctcaatgtccgcgagatattcggaaacgataatccggttcaccttgaagtcggatgcggaaagggcggatttgcggtcgaagcggcaaagcgtaaccccgatataaatttcatagctgttgaaatggcacgaaatgtaatagtcagcgctatggagcttgctgttaaagaaaatctgcctaatctgaaattccttatgggcaaagccgaataccttgaaaagtttttccccgaacgctcagtagaacgtatctatcttaatttcagctgtccttaccctaaggaaacatacaaaaagcaccgtcttacccaccctgtatttctggagatatacaagcacatacttataccggacggtgagatacatcagaagaccgacaatatgaagttatttgagttttcgatagaaaatctctcgcagtgcggcttcaagctcaagaatgtaagtcttgatctgcataacagcggttttgagggaaatatagttaccgaatacgaaaagagattttcccagcagggacttccgatttatcggcttgaagcagttaattcgtcaaaatag

SEQ ID NO: 1072 - DNA, 1464 bp, Eubacterium siraeum
  misc_feature: SEQ ID N?2473220
atggtaactgacgtacttttacgtttaaagccggaacttgcactgactctttatgccgaagattatgccggcggcacttatgtcggatacggcttcactctccgagcgctaagcgacaagagctgtatcatattcaacacttgggttagaaagagcgcactcacaagtaaaacggcagacggatttttcaccgaatatatggcaaagcccgaaaacagctttgtcaaggcttataaggtgagtgacccaaacatctcagcggttctttttgcgggaagtgacgacaataaaaccacatcggatataaagcgctttattaccgatatagttaaatacttctctgcaaattattacagcaacgcctgcgcaaagtgcaactcttcgatcggactgggctttgcaaaggcttctgacggcagtataaagcagttatgcaagatgtgcgtgcaaagtgaagaggacgcggcagaaaatgccgtatcagctcaacagacaacacctgttcagcctgctatcaacaatcagcctgcattcaatccggcacagcctgtgatgaatgatcagcagacatttaatcaggctcagcctgtacctcagcctaatacaggagtatacggagtgcctataggcggcgcacctgtaccgcctgttacgaataactttcagacggaaaatgttataccggctatgggcggtactccgcttccctcttctcagtcgggcaatgacgcaatggcggcaatcgaccctgcaacagcacccgaaagtacgggatattcaaccgctcagtcacttgcagagctaaagcccccgacaaacggcaatctccctcctatcaatggtggcttttcgcagcccgcatattcaccgatgaataataacggcggctttgtacagcagccaatgaacggcggctttgtacaacagcctatgagctcgtttgccaatgacggtcgttttgtagcaggcagacccaccgcgatagttcaggaaagcaagccgcttatgggtatcctcggcgctctgctcttctcgcttatcggctgtgcgatatggataattataggaaagctcggatatatttcatatctcggcggcgttgcaatggcattctcaactatattcggatatcacctgttcggaaagaagtttgatgttctgggtcttatcacatctatcgtaatagtgcttataatggtactgctgagcaatatgttcatatgtgcatggcagatagtaagcgaaccgggaatagatgaagctctttctctactgggttatgaaggtttcttcagtgtgttcttcggtctgtttgaccttatgaaacaggtcgaccttctgacgggacttgaaggtatggactcaatgacaggtacgtttatcagcgatctggtcatcggatacatcgtttccggcatagcaacagttgctatcggcgtatcaatgctcaaaaaagacagataa

SEQ ID NO: 1073 - DNA, 1293 bp, Eubacterium siraeum
  misc_feature: SEQ ID N?2473306
atgatattctatgcatggggtgagccggtctgggttttcctgcttgtcggaagcgttacggtaaactatgttgcgggactgctgatagataagttccgtgatacaaaaaaagctaccgcggtaactgccggtgctcttatatttgatataggacttctgatgttcttcaaatatacaggcttctttgttgaaaatttcaatgcgataagcccggtcgacctacccgtgccgcatatagaaatgccgataggcataagcttcttcacattccagataatctcctatatccttgactgctactggggcaagataaaggttcagaaaagttggtacaagctgcttatgtacatctcaatgttccctcagctcgttgcaggtcctatcgtccgttatgctgtaattgaagatgagatagataacagagtgataaccaaagaggatatcagcgagggtatcacaagaatatgtatgggtcttggcaagaaggtgatccttgccaataacctcagcactatagttgatacgttcttcaagaacggcgaccttgcatcgttatccgtagtcggaacatggtacaccgtaatagtttatgctatgcaggtctactttgacttctcgggttattcggatatagcgataggtcttggccgcatattcggcttccactttgacgagaacttccgctatccttttgtaagcaagaatatcaccgaattctggcagaggtggcacatctcgcttggtacattcttccgcgactatctgctgtacgttccgatattcggcaagagaagaaagtatcttaacctctttctcgtatggttctgcacaggcttctggcacggcgcaaactggaactatataatctggggtctttacttcggactgttcattctgatagagcgcacaataggcaacaagaatatgagaaagatgccaaaggcgcttgcgcacatatataatacgatagtagtcgtggtgggcttcggtatattctactttaccgatcttggcaagctcggcacattcctcggaaaccttgtcggacttaacggcaactcatttgtagataagatatctacacagaatatgacagcaaatgcgtggctttttattgtaagcgtagcgctgtgtatgcctgttgttcccgcactcaagaagaagcttgagagtatgaattattatcttgcaacctctgtaggtcagacggtgcttaatgttgcggtattcgcactgagcagtatactgcttgtaaatgccacaaacaacccgtttatctattggcagttctga

SEQ ID NO: 1074 - DNA, 786 bp, Eubacterium siraeum
  misc_feature: SEQ ID N?2473365
atgaagctgaaaaacattatccgcttccgccatatgcgcgtgcagaagctgagcacggtccaggtgcttatccgtgtgttcttcgtgtcgggctcggtgtgccttatcgcggcgctgtgttgcgcgatatttctcgataaggactacagaagctctgtaaagcgcggctcacagagctttccttttaccgaatttctgacggtggaaacgacagatataccggtgtacataacgcggtctgccgatgatatgatacacgtttcgtatgtcagcgacaccgaggtcgaggtgtttgacgacggcgggcggcttgtgatagaacaagtacccggctttgtgataacgctgttcacccgtgagcagttcagctacaggatagaaattcagctgccggataagccgtttgcaagccttaacctctattctgcgtcgaccgacctgcactgctgtgcggtgagcgggtatatggtgaatgtcaggtgtaagagcggcagtgccgaaattgagcggctgtcctgcacgggtacgcttgatatcgaatgcgacagcggcaggatagatatgtatatagatgaattttcgggcggtaagcttgtaaactcatcgggaagcatagacatcgactttgcagggaacgcagatacggtgatctctcccggtacacggtgctatgtcaacggacttgccgctatgagcgacggcagagccgcagaaaaagacgatctcgggataacctcgccctcgggcagagtaagaataaatacaaatataaagcaggctcagtaa

SEQ ID NO: 1075 - DNA, 1389 bp, Eubacterium siraeum
  misc_feature: SEQ ID N?2473510
gtgacaggcgttaccgatgatacgcgtgaggtcaccgaaggcagtatatttgtctgcataaaaggcgcaaattttgacggtcacagcgcggcacggaaaatgctcgacagcggcgctcaattggtagttgccgaatatgatacaggctgtgagcgtcaggtcatagtgaaaaacacaaggcttgagcttgcaaatctgctttcgcgcttttacggtgagccaacaaagaagtttaaactgcttgctgtcaccggaactaacggcaagaccacaactgcgcactttgtaaagcatatacttaatgttctcggtaagaagtgcggctgtataggcacggctggaaatgatacctgctccggtgagctcaaaccctcacagcatgggactccgacagtgcctagagcaacggtgctgtatgagtggtttaaagaaatggctgataacggcgcggattactgcattatggaggcaagctcacaggcactcgaccagtaccgtataggcaatgaaaaagttgctgtagcaggatttacaaatctgacgcgcgaccatcttgattatcacggtacgatggaaaactattttcaggcaaagcgccgtgtgtttacaatgtgcaaaactgcggtagtaaatatcgatgatgaatacggcagacggcttgccgatgaattttccgacattgctgtgacctacagcgtaagcggcgaggcggatatatacgccgggttcataaaaatgaacacgcacggttcgtcgtttatgatagtcaatgagcgtgagcacagggcttgtcgggtagatatacctatggcggggctttataatgtgcagaacgcactgtgcgcaatagctatggtgacggcgctcggatacgatatgaccgagtgcgcaaaggcacttgcaacgcttgacggtgttgacggcagaatgaatgttgtgtatcgcggcgattttaccgtaataaccgattatgcgcataccgatgacgcacttatcaaggtgctgtcaactcttaaagcagtaacaaagggcaggcttatatgcgtgttcggtgcggcgggcgacagggatagggaaaagcgcccgatgatgggaaaagccgcggaagaaaatgccgatatgcttgtcataacatctgataatcccgcacatgaaaaccccgatgatataataaaggcggtgctttcgggcactgctggtacaaagccttgtaagtgtattaccgacagatatgaggctattgagtacgcacttgatatcgccgggaaagacgatgtgatcgcactgtgcggcaagggtcacgaaacctatcagataatcggcgatgaatatctgccgttttgtgaaaaggacatagtaaaagatataatgaagaggaaaggaaactga

SEQ ID NO: 1076 - DNA, 1773 bp, Unknown
  BMI gene
  misc_feature: SEQ ID N?2473530
atgaattacggacattttgaccttgaaaacaaggaatatgtcatcacaagacccgatactccctcggcatgggctaactacttaggctcacccgaatacggtgctatcatttcaaacaacgcaggcggctacagcttcgttaaatccggtgcaaacggacgtgttatccgttaccgtttcaatgctgttcccaacgaccagcccggcagatatgtatatatcaaggacgctgaggacggcgatttctggtcggcatcatgggcacctgtatgcaagcccctcgacagctataagagcgaatgccgtcacggtacagcctacactgtcatcacctctgagtacaagaagatcaaatctgaggttacttactatgttcccatggacgctacttatgaagtatgggctgcaaaggtaacaaacacagatacaaagccccgtaagctgagcgttacaggctactgcgagttcgtaaacgatcccaactatgagcaggatcaggtaaacctccagtacaccctgttcatcacaagaacatacttcaagaacaagtatatccaccagatgcagaatgagatatacaaccccaacagcggacgtttcttaggtcttgcggctgctaaggttgacgcttactgcggcgaccgcgacgcatttgtaggttcttacagaacatacaataaccccaagggcattgaagaaggccttaagggtgacctgaactacaacacaaactcatgcggcgcacttcagagcgacattgttcttcagcccggtgaaacaaaggttcttacttacgttctcggcggtcagaagacagaggctgaaattgaagctatcattgccaagtatgaaaaggacggcgcagtagaggctgatcttacagagctcaagaactactggcactcaaagctcgataatctgcaggtaaatactcccgatgccgacttcaacaacatggtaaatgtatggaacgcatataactgcttcatcacattcatctggtcaagagcagcatcattccagtactgcggtctgagaaacggcttcggataccgtgatactgtacaggatatccagggcgttatccaccttgcacccgaaatggctaagaagcagatcgtattcatgctctctgctcaggttacaaacggcgcaggtctgcccctcgttaagtacgatcacaaggcaggacaggaaaaccaccccgatgaaaatgacgaaaacagcgtatacgcaaagcagacaggtcacccttcataccgtgcagatgacgctctgtggctgttcccgacagtttacaagtacatctccgaaagcggcgaccacgcattccttgacgaagttatctcgtatgcaaacgacggcgaatccggcacagtatacgatcacttaaagagagctatcgacttctcgatgaaccacctcggcaaccacggtatgcccgcaggtcttcacgctgactggaacgactgcttacgtcttggcaagaagggcgaatctacattcgtagcattccagctcgtttacgcagtaaagatcttaaagacatacgctcttgaaaagaacgatgcagagtacgcaaagtaccttgatgaagtaaaggctaagctcgatgagatactttcagcttgctggaacgaggacagatggatcagaggctataaggaagacggcactgttatcggtcagagaacagatcccgaggcttcaatgtggctcaatccccagtcatggtcagttatttccggctttgcaagcaaggaacaggctgaa

SEQ ID NO: 1077 - DNA, 312 bp, Eubacterium siraeum
  misc_feature: SEQ ID N?2473746
atgataattatggtaaaagtaaatgtaaagaacggcacgcttgatcagaaagagatagatgcctatgttcagtatgcgattgaagctaatccgggaaaactggtaaccgaacttgatataaatcttgacggtgattatgtcgatcttacatatcatttcggtgaaattccgtttgatcgcatacgccgtatcacaggatatcttgttggtacacttgacagatttaataacgctaaaaaagctgaagttcaggatagagtaaagcacagcattactcctgaggctgaagaagatatttatgtcactgcttaa

SEQ ID NO: 1078 - DNA, 963 bp, Eubacterium siraeum
  misc_feature: SEQ ID N?2473748
atgtttgacataggcagaaaattcaggctcagaagagctgtaaaagaagcattcgataatcttcctatcggtatatgcttttttgacagaaacggtatggttacattatgtaatacacagatgaataagcttgtgtatgagatcagcgggaacgatatccgatatatagacgacatatttaatctgctcggtgaagaaagaagctcgggcggcacagtcattatggtcgacggtaaagcatggcgtttcagaccggatatcgttattgatgaatacgaagactgttatacgcagataaccgctacagatgtagacgaattgtatgcatacaggttaaaactcgaagaaacaagcagaaagctcgaacgggcgggcgagcgtatgagaaagctgaccgagaacatcagaacggtcatacgtgaggaagaaatactcggtatgaagatccgtgttcatgatgatataggcaggagcgtgatcgcgacccgcagtttgcttaacaataaccgtccgacaaatgaacttgatcttactgtgtggaaaaatgcggtcaggcttcttatgagggataacgaaaagaacagcggtacatacagctatgatatatcggaacagctgaaagaaacgtcttctgttctcgggattgaaataaatattaccggagatattcccgatttattttataacaagatattcatcacagcggtcagagagtgtgcgtcaaatgcagtacgtcatgcaggcgcagcaaagctgaacgtaaaatgcagtaaatgcggcggaagacaatggatagccttgtcaaatgacggaagagctccggatagtaccgttactgagggcggcggtctttcatcgcttcgtgacagaatagaaaaaagcggcgggacaatgaacataaactcatatccgttttttgagcttgtaatatctttcccgcttaaaaaggaggtaacgctatga

SEQ ID NO: 1079 - DNA, 1422 bp, Eubacterium siraeum
  misc_feature: SEQ ID N?2473756
atgcacttctttgacactcatacaaagggcgatcttgtaacaaggcttacgggcgaccttgatatgatacgtcattctatcgcatggataattatgatggtggttgaaagcggtgcattgttcttattcaccgtgatctacttttttacgattgactggctgatgacgctttgcatacttgcgcttactccgatactctttatagtgactcgtatgtttgcgaaaagagtaggaccgaaatatgtagtgctgcgtgaaaagctctcgcgacttaacacaaaggcgcaggagaatatcgccgcaaaccgcgttgtaaaggcttttgcccgtgaggattacgaaaaagaggactttgacaagtataacaaggattactgcgagcataatcaggaggcggctatggtatggcttacattccagccttacatagaaacactggcgcaggctctctgggctgtgcagatgcttgtcggcggcatatttgttatcaacggaagaattacaattgctcagtacacagtattctccggacttctgtggactatagcaaatgctatgagaaatatcggtatgctgataaatgatttacagcgtttctttgctagtatttccaagattatcgaggtatattattcacgcccgaatatcgtgaacaatcataacagtgccgaacgtccccgtcttaaaggtgatatcgagtttaagaatgtatcggcaaagttcggtgatattactgtccttcacaatatcgatcttaacataaaacacggtgaaaccattgtaataatgggctctacaggttccggcaaaacaacgcttatgaaccttatcgccaggttttatgatgtgtcggagggcggagtatatgttgacggaaagaacgtaaaggattacgaacccgatgtacttcgtgcgaatatcggtatgactactcaggaagtcctgctgttctccgatacggttgacggaaatatagcatacggtaagtcggatctgccttttgaagatgtaaagaacttcgctcatttagcgtccgcaacatttatcgagaagatgcctgagcagtacgaaacgataataggcgagcgcggtgtaggtctgtcgggcggtcagaagcagagaatagcgctggcgcgtgctatggctatccgtccgccgatactgatacttgacgatactacctctgcacttgatatggaaacagaggcagagatacaggaaaacctcaataatcttgattttgagtgtacaaagctcataatagctcagcgtacatcctccgcaagatacgcagacaggatcattatccttgaggacggtcgtatcaaggagtgcggtacgcacgatgagctgatgaagctgcgtggctactactatgaaatatataccctccagaacggtacagaagaggaggcggtttaa

SEQ ID NO: 1080 - DNA, 1353 bp, Eubacterium siraeum
  misc_feature: SEQ ID N?2473811
atggcaaatccatatttaccatgctgggaatatatccctgacggagaaccgagagttttcggtgaccgtgtatacatctacggttcgcatgacagagcaggttcaggcgaattttgcgactacattctcaaatgctggagcgctcctgtaaacgaccttaataactgggtatgtcacggtgttacgttccgtgtaaagcccgaaggcgaccgtccctcggacaccgattggacacctgatacaaatcagcttctttttgcacctgacgttgtgtgcagagatggcaaatattacctatacgcttatatagtgaatgcaatcggctgtgttgcagtcagcgaccgccccgaaggacctttcacgcttctctccaagtacaagtataccatatcagacgaggtatgctgcaacggctggttcatcgaccccggcgtactggttgacgatgacggcagaacctatatatactgcggctttgagcgctcttttatggctgaggtagacaccgatacaatgtacacgataaaggataacacctgtatcgaacacattatcccgataacccccgacaaggaaaacggctttgatgaggaagaatcactcttcttcgaggcttgctcaccccgcaaggtcggcgatacatattaccttatctattcacccaagcgcggttcacggcttgcctacgccacctccgataagcctacaggaccgtttaagtaccgcggatacatcgtcgataacggcgttgattatcccggcggtaacgatcacggctcgatagctcagataaacggtaagtggtacatcttctaccaccgtatgaccaatggtacgataatgtcaagacgcgcctgcgttgagaagatcgagatacttccggacggcactataccgcctgttgaaatgacttcgctcggctttgaggacagcctgaacccgtacagaataacagatgccgagattgcctgcgtacttaagggcggagcgtttgtcaccgagcataacgagtttgaaagggtagtcacaggtattaaagacggcgctgtattaggctataaatactatgatttcgggcttgacaacggcaacggcagaatgtacttcaaagctgatataacagggcttggcgctgattgcaatgtgcatatacgcattgacagtgaggacggcgaggaaataggttcgttcaaggtcggtcacggcagcggcgtttacaagacggaggtaaagcctgtcagcggcagacacgctgtattccttacagcagacacggattacacaggctgggtgacttgctatttcaaggaaagaccgctgtttgaattgaagaagtttgtgttcacaaagtag

SEQ ID NO: 1081 - DNA, 795 bp, Eubacterium siraeum
  misc_feature: SEQ ID N?2474002
atggactacacattcacttgcaagggctttgatataaggcgtacgcttttctgcggacaggctttccgctggaaagagctcggcggcaatttctgcggcatagcaggcggcaaatacgccggcataaccgacaacggcgacaacacttacaccatacacgagatagaaaaagaagatatttcttactggcagtcatactttgaccttgatacagactacgacgcgctgatagagcggttctcaaaggacgagcatatgcgccttgcctgcaaagaaaaccccggtataagagtactaaggcaagagccttttgaaacgctcatcagctttataatctcgcagaataataatataaagcgtatcaccggtattattgacaggctgtgcgagagcttcggggaaaagacggagcacggatatgctttcccgacacttgaaaagcttgtcggcgttaccgccgaggacttagcgccgctgagagcgggcttcagagcaaaatacatagttgacgcggtagaaaaactgcacagcacagaagtttcccttgacggcataaacgctatggataccgatacagcaagagaagagctgaaaaagataaagggtgtcggaaacaaggtcgcggactgcgtactgcttttcggctatcacaagacggacgcttttccgagagatgtatggataaagcgtatcgagcagaaattatatccggacggtctgccggaatgcataaagggcaacgagggcatagcacagcagtatttattcgactatgcaagaacacacgagatctga

SEQ ID NO: 1082 - DNA, 1530 bp, Eubacterium siraeum
  misc_feature: SEQ ID N?2474079
atggacttttctgtaaagaaagagcctgtatttgtcacggaagtggtatatgacggacaggcggagcagggcgttgagtttgattacgtcctgccggattattatcccgatatcttcaagatattaagatgtactttgcgaccggggatagtatcctataatatttcgggagataaactgatatgtgacggcgttatctgcataaccgcactttatttaagcgagggcggcggtatggagtgcatagagcatcgctacagttactcaaaaacggtcgacctgccgaaagcagcagataacggtacagtcataatagagcctaaagttgattattgtacttgccgtgctgtttcgggcagacgtatcgatatcagaggggctgtaagcttcaagataaaagtaagctgtgtcacaccttttgatataataaccgaaatggaaggcggtctggtgcagactaaaaagaataaggtctgctgtacgagaaagctcaccgggggaaagcagtttgtgatacgtgaggatataggggtatccggcgttgatggcaatatcaaggcagtagtaagctgtgatgcggttgcaacggtaaacgactgcaagataattgccgataaagttgtgctcaaaggcgtggctcagctcaaagcaatgtatcttgtgcaaaatgacggcggcagcatgctacagactatggaggcggaggttccgctcagtcagatagtggatatgcccggagttgatgaaaagcatacctgctatgcgcagttcaaggtcctgtcatgtagtctttgtgtaaaatccgcagacgacaatacatcgggtgtttttgcctgcgaactcacggtaggctcacagataaccgctactcttgaagaaaatgtatatccggtaacagatatgtattctacagggtacgagtgtaattttacaacggcgacactcaaagcagagtcggatcaccgttacataagtcagaccttcaacacaaagcggattatcgaatgtgagaacggtattccggacagtgttatagatgtcagctgtgatgtggctgaggtactgtgcaaggcgggcgagaacggagatattaccgtgaacggtaaattgatatgctgtatcgccgctgtaagagaaaacgagcctgtattctcggaaacgagcctgccgtttgaggcggtggtatcggtcggcggagttacggcagacagcgtaattcagtcggcaatcagtataacagctgtaagttacagtataggtgataacgggatagagctcagatgcaatatgcttatgcagggaagtatgtatatttgctcttcttcacaggtaataaagcaggcggaaataaatgagaacgaatgtaagaaaaaagatgatgagtatacgcttaagctttattttgccgactcgaatgaagatatatggaatatagcaaaacgctataatacctctgccgcggcaatagaagccgagaacgaagtcaccgacggaaaggcgtcggggcttctgctgataccgatagtttga

SEQ ID NO: 1083 - DNA, 519 bp, Eubacterium siraeum
  misc_feature: SEQ ID N?2474081
atgcttattgcaaagataaccgacagcgatttctttggtggtgagcctcagtatatcgaagatgacacacgctataatacaagaggtgtcatgacggacggagacggaaacatcgctatgatgaagatagaaaactccgactactataaattgccgggcggaagtatagagataacagaaactccggacaaggcttttcttcgtgaggtcagcgaagaaacaggttacgccgccgagcttatcggatatctcggctggatcgaggaacacaagttcaaaaggaaattctgtatggtatctcactgctatgttgcaaaaaaagcatccgacaaatgcgatatggaagttcttgcacattctcaggaacgcctcggttataaaatagaatggacgccttacgacgaggctgtaagcaagcttaaagcgctttcacaacaatgcaaggaatatcagatgagctttgttctgaaaagagaacagcttatacttgaaagggctaaagatttaatcataaagtaa

SEQ ID NO: 1084 - DNA, 2400 bp, Unknown
  BMI gene
  misc_feature: SEQ ID N?2474086
gtgcaacaaggaattttcgacgagagggagaaacaaatgctgactaaaatccagaagagggacggtcgcacagtgccgttcaacattgagaagatagctgatgctatatataaagcagcgagagctgtcggcggcaatgactatcaggaagcaagtgaaatggcagaaaaagtttgcaattatcttgaaacaaacgccaacaaaacaggagaactgcctacggtagaagaagtacaggacgcagtagaaaaggtgcttgtcgagagcggtcacgcaaagacagcaaaggcgtatattctttacagagccgacagaacaagggtaagagaaatgaataccagccttatgaagatttacgaggatcttacatttaaggctgcaagggattgtgatatcaagcgtgagaacgctaatatagacggcgataccgcaatgggcacaatgcttaagtacggttcagagggcgcaaagcagttcaacgagatgtatgtgcttgctcccgagcattcaaaggcgcacagggacggcgatatccatatccatgatcttgattttctgacgctgactacgacctgctgtcagatcgatctgataaagctgttcaagaacggcttttcaaccggtcatggctttttaagagagcccaacgagataaccagctactcggcgcttgcctgcattgctatccagtctaaccagaacgatcagcacggcggtcagtctatacctaactttgactattctatggcggacggtgtacgaaagacatacaagcaccgttatgctcagaatatcgtaagaggacttgaacttatcggcggtattgaagaccttgcaacagcagaagccgatgtaaaggcttatactaagaagcttgaggaagaaaggcagcttgcgccggtgctcgctaacgacaatgactatcaagaagcagagcgcatatgtcttaaagagatttgtcccgatgtatcagatgaaacaatagaaaagatacagaagtttgcgttaaagcaggctgaagttgaaacagacagagccacatatcaggctatggaggctcttgtacacaaccttaacaccatgaacagccgtgcgggtgctcagataccgttctcatctataaactacggtactgatacatctcccgagggaagaatggtaattaagaatgttctgctggctacagaggcaggtctgggtaacggtgaaacacctattttcccgatacatatcttcaaggtcaaggacggtctgaactataatgagggtgatcctaactatgacctgttcaagcttgcgtgcagagtatctgcaaagaggttgttcccgaacttctcatttatagatgcgcctttcaatctccagtactataagcccggagattataacacggaaatcgcatatatgggttgccgtacccgtgttatcgccaatgtttatgatcctacaagagagatagtgacgggtagaggaaacctttcattcacatctatcaacctgccaagactgggtatacttgcgggcggggatatcgtaaagttctttgaaatgcttgaggacagaatgaacctcgttatagatcagctcctctacagatttaagatccagtcacagaagagagtaaagaattatccgttccttatgggtcagggcatatggatcgattcggaaaaactcaatcctaatgatacgataggtgaagttttaaagcacggtacgctttctgtcggatttatcggacttgctgagtgcttaaaggctcttatcggcgttcatcacggcgaaagcaaggaggctcaggaactcggtcttcgtataatcggcagaatgaaggcgagaatggacgaggaaagcaaaaagacaggtcttaacttctcggttcttgcgactcccgctgagggcctttcgggcagatttgtaaagatcgaccgcaagagattcggtaagatcgaaggcgtaactgacagagaatattacaccaactcattccatatccccgtttacttcccgatcaacgcattcagaaagataaagctggaagcgccttatcatgcgcttactctcgcaggtcacataagctatgttgagcttgacggtgacccgttacagaaccttgaagcgtttgagcaggtcatcagatgcatgaaagagtccggtatcggatacggctctataaatcatccggttgacagagatccttgctgcggatataccggtataatcggcgatgtatgccccaagtgcggcagaagcgaccatggcgacaatacgagatttgagcgtatccgccgtatcacaggttatcttgtaggcacggttgacagatttaacaacggtaagagagctgaagaaagagacagagtaaagcacgatgtttctatgaatgagcttgacgattga

SEQ ID NO: 1085 - DNA, 786 bp, Eubacterium siraeum
  misc_feature: SEQ ID N?2474090
ttgaaaaatattgcgccgattttacccggtgttacagtcgcacacgctgaaaacgagaatgtgaaaggaaaaattgttatgtcaaatgtaccaacaccccatataaaagcgcagcagggagagatcgcagagaaaattcttatgccgggagatccgctgagagcaaagtttatcgcagaaaactatcttaccgatgccgtttgcataaatgacacaagaaatatgctgggctacaccggactttataaaggcggacgtgttacggtaatgggaagcggaatgggagtttcgtctatcgggatttacagctatgagctttataatttctacaaagccgacactatcataagaataggcacggcgggagcgcttgttcccgaggttcagccgagggacatcatcattgcccagggagcttgtcatgacacaaacgttgacagacagtacggcctgccgggtacgtttgccccgatagccgatttcggactggtgaagagagcttatgagcttgcgaccgagaaaaaaatcaaggctcatgtcggcaatgtgcttaccggcgaggtctattatgatgcttcaaacagcctttcggcatggtcaaagatgggcgttctggctgttgaaatggaagcggcagcgctttatatgaatgccgccgcggcaggtaagaaggcactttgtatatgcacagttacaaacaatccgcttaccggcacagaggatatcacgcccgaagaacgcgagaaaacgctgaccgatatgataacaattgcgcttgaagcataa

SEQ ID NO: 1086 - DNA, 909 bp, Eubacterium siraeum
  misc_feature: SEQ ID N?2474115
atgacagacaatatcaagacaaacgaagtcgcagagcagacctcgttcaatatggaaaagtaccgtttcaaggaaacaccgcacggtgtcagaatttttataaacgtactgaaatatgttgttctggttgtagcgtgccttatggttcttgtgccgctggtagttgtgctgctgggttcgctgaaaagccaccaggacttccttaaaagcggagctttcgagcttcctaaagtagtggaacttgaaaacttcaagacagcattcattcagggtaatgtattaaagggctttatcaatacagctatcatacttgtgttctcgtgcgccggcacaattatcacaggaacaatgacagcctttgtcgtacagcgttttacaatggtgttcacaaagcttatcaagaatatattccttatcgcggctttactgcccaacatctcaatgcaggtcacagtattccaggtagtgcacgcactcggactttacgacacgcttgccgcgccgatagttctttatatcggtacggatatagtttctatctatatcttcatacagttcctcaacaatatctcggtatcccttgacgagagcgcgatacttgacggctgttcatatccgcgtgtttactggagcattatactccctatgctccgacccgcaatagcaactgtgcttgtaataaagtttgtaagcatatacaacgacttctatacagcaaacctgtatatgcccagtgacggacttcaggtcgtatccacggcactgtacaagttcatcggcccttacggctcacagtgggagataatcttcgcaggtgttatcatctgtatcgtaccgacacttgtaattttcctttcaatgcagaagttcatttacagcaaccttgtttcgggttctgtaaaggaataa

SEQ ID NO: 1087 - DNA, 1191 bp, Eubacterium siraeum
  misc_feature: SEQ ID N?2474124
atgaataaaaaagtatcgcttggcgttacaataagccttatagcggtagcgtgtgccataaccttcgtactaacgatgactgtgtcgctcaatatgtacaattcaatggtagccggcatacaggagcgggaaaccataaacgcaaagataaaagaagtagatacgtttgtccgcagctcatcgatatataagcttgatgagaatgagcttatcacaggtatcgcaaacggttatataagcggtacaagcgacaaatacgcgaaatactacacatcagatgaatattataagctccagcagatacaaagcggcgttattatcggaacaggcgttgaaactgcggtaaacggtgactatcttgaagttaccgatgtatatgaaggctcatcggctgatgtcgaggagataaccaagggctgtatgataacagcaattgacggaaagagcattcttgaaacaggagcggaggcagcgcagtcaaagcttgacggtgatgaaggtaccaagcttaaggtaacgttcagtacacccgacggaaacgaaaaaacggtaacattggtcagacagagcataaagctcacatctgtaaagggcgagcttatagacggttatgcatatataaagatatatacgttcaacgacaccactgacgacagatttttacagcttatcgatgaatatgaagcacagtcggttctgggatatatctttgatgtccgtgatgtaacggacggcatcaccgaaccgcttaaggcaatgctgaaccgtatacttccgaaagcaactgttgcggcacaggttgatgcaaacggtaaggacacaacgtttatcgaaacagacggtacgttatcgcttgacaagccgataacagtgctcacaaacggtaatacagcctgccttgcggagatatttgcggtaggtatgcgcgactttgcaaaagcctcaatcataggctcagttacggcaggaaagtcacagcttcagacgacacagagctttaaagacggcagtgccgtttcaatatccacggcaactattatccctaccgagtcggacgatttttccgataccggaataaagccggattatacggtcgatattaccgcacagcaggcagagcagataaagtttgcggataaaaagagcgacacacagcttcagaaggcgcttgaaatagtagcgacaaaataa

SEQ ID NO: 1088 - DNA, 693 bp, Eubacterium siraeum
  misc_feature: SEQ ID N?2474127
atggtagaattaaagaacgtcgacgttcatttcaaggacggcggcggagttgacgctttaaacggcgtcaatttgcgtatagaggacggagagtttgtctttatagtcggtgacagcggcgcaggcaaatcgacattgctgaagctccttacaagagagatagcaccgacctcgggcagagtattcgtaaacggatacaatcttgccaagataaaaaacaagaagatcccgtatttcaggcgttctataggaatgatattccaggactttcgcctgatacccgatctcaacgtttatgacaacgtagcatttgttctgcgtgttacaaacaaaccaaaaaagacaataagacacagagtgccgtatgttctgaaccttgtcaagcttgtcgagagagcaaaagcttatcccgacacgctgtctggcggcgaaaagcaaagagttgccattgcaagagcattcgcaagcgacccaaagctcataatcgcagatgagcctacagcaaacattgacccggcactgtcgtatgacatagtaaagctgctcaaggagatcaacaagtgcggtactaccgtaataatggttactcatgagcacagccttgtcgaatatttcggcggaaggatcgtcagtcttaaaaacggcgaagtcgttttcgacgaatatgtagaaggtgaggcgcaggatgaataa

SEQ ID NO: 1089 - DNA, 744 bp, Eubacterium siraeum
  misc_feature: SEQ ID N?2474221
atgaaaaaacatcttcctgccgtactgacgggaataggactgcttatattgtggcagataatcgcgatgtgcataaacgcggcttacattctgccatcaccgacacagatcgcggtgaagatatgggagcttcgtgacccgctgtttacggtgcacacccccgcaacaatgcttgtaacgcttatcggacttttgatttcaatagttctcggtgtgggacttgccattgtaatggagcgctttgagtatgtcgaaagggcactatatcccgtaatcgtcacaacgcagacgataccggttacggcgatagctccgctttttgtattgtggctcggatacggcatatggagcaaggtgcttgttgcggtgcttataacattcttcccgataactatatctgtacacgacggacttaaatccgcaaaaagggaaaatgaggagctgcttaggactatgggaatgggcagtacggcgatatttttcaagctgaaatttcctgccgcattgccgtcattcttttcggcaataaaaatggctataccgctcagcattcttggagcggcaatgggcgaatggctcggtgcgcagagcggactgggatatttcagtaaacgtatgatgacacagcttgacggtgcgggagtatttgctcctgtagttgttcttgcggtgtgtgcaatgctggttgtagctgttatcagtgcaatagaaagaaaacttataacatggagaaaggaaatttaa

SEQ ID NO: 1090 - DNA, 621 bp, Eubacterium siraeum
  misc_feature: SEQ ID N?2474310
atgccggttaacacagaaaacaaggtgctgacacccgaacagatagaaggcaacaagcaggagatactcgatatctttgcaaagcacgttcacagggacggcgttgaaaagctgctcgactatcttgtaaataagagcgatttctttacagcacccgcaagcacacgctttcacggctcgtatgacggcggacttgcacagcattcgctgaatgtatatcattgcttcaaggcgtaccttgagcgcgagcgtgtgcgtgatatgtacaagctcacggcaagcgaggaaactatcgcgatatgcgctctgctacacgatatttgcaaggtggacgtttacacaagaggcacgcgcaacgtcaagaatgagcagacagggcagtgggaaaaagtgcctacatacttctttgatgataagctgccttacggacacggcgaaaagtccgtttatatgataacgggctttatgcggcttactcgcgaggaggcgttcgctatccgctatcatatgggattttcgggagaagagaacgtaaacaacgtaggaaaggcattcgagatgttcccgcttgcatttgcgctgagtacggcggatatggaagcttcgtatttccttgattga

SEQ ID NO: 1091 - DNA, 792 bp, Eubacterium siraeum
  misc_feature: SEQ ID N?2474316
atgaagatgaccggcagaacagagcttgcaagtgagtttccgacccgaaaaaacggcatagtatgcggaagctatgagctttacggcgaaaggataacagaaatagtaatatcggaagaggaaaaagcggctttcgatcgtccgagcggaaaatattatgtgatagaaagcggagatgtaccgtatgttgacgggcagatacgggcactttgcacggtcctgcgtaagcttcttccggaagggaagtgccttgtagcagggctcggaaatccgtcagtcgcttcggacagtctggggtggaaaacagcaggcaaggttctggcgacctcgcaatttgtcgaaaacgttcacggtacggacgggatcggaaatattgcggtcatacgcactgatgtcagctcaaactccggtattgacagtgtatatcataccatattctgtgccgagaaaataaatgccgattatataattgcgatcgacagtcttacttgcagtgatcccgggaggttgtgcaggactatacagataaccgacaccgggatagctcccggcagcggtatcggcggcaacaagaagcagcttgacagacatacggcgggtattcccgttatcgctgtcggtgtgccgacatctatggagtatgaaaacgcaagcgaaaaattccttgtaacaaggcacgatatcgatataaaaatatccggatactcacatataatatcggcggcgataaatcgtacgctttgtccgtccctttcgcaggaggatatagctatgctgatgaattattcgtga

SEQ ID NO: 1092 - DNA, 894 bp, Eubacterium siraeum
  misc_feature: SEQ ID N?2474365
atgaaaggagcggatagcatgaagctgtttaaacgctttaaaagtaaaaaaggctttacgctgacagaggttctcgtttccatagtcatattcgctcttatgtccgctatcgtaatgcagatacttgctattgcgatagcacagcacaggaagaacgacagcgtggataaggatatggacacgcagataagtaatctcgttcaggaaaacgcgctggttgaaagagatacggtcaagcttgtgatgaagtttgtcagccccacaggcgcgtcaaataatctacagatcaatgatgtcaagatacgcaaggacagcaccgaagccgataatgacggcagacttgagatcaatacaattgatgccaccatcaagaatgacggcggcaataaggataaggataaaaacagcggcggtatggtaaccgatgatatccatatctatggcacaaagggtatcgaaaaaatatacgccaaggaagaaagctgtgagcttgacggcgatgtttacagaattaagctcagttttgatatcacaaccacagtaaaccacgctcttaacggctctgaaagcaaatcgctgaaaattgcacttcccgaaagcgcaaaaaacatagtagttactcccgatgccaagctgctgtacagtatggtatccggtacaaatgtacgtttcagcgcaaaaaaagccaatgattctgacagctcgtatacaaatacgataacattcactgtccctgaggataagtttgaaagcgattacggctcttttgcgaaatactttatagacccgaagagcacaagcacagatacatcggcttcattcgatgatgcggcaaccaacggtatctacaatcacctttacggaacacctgtaaaggaggatgatactccatga

SEQ ID NO: 1093 - DNA, 1062 bp, Eubacterium siraeum
  misc_feature: SEQ ID N?2474371
atgttcgttatgactatgaccaagcgcaagcttatccgtgcggtcatgtttgttttagtgctgttgacgggtatcgctatcggagtgttcgctatactctcatctatagataccggggctgaaaatatcaagctgcctatatataatgtaaaacgcaccgacaacaaaatcagcattacatttgactgcgcatggggaaacagcaacaccgacaagctgatctcaatacttgccgaagccgatgtgaaggctaccttctttgttacaggcgaatttgcggataagtatgccgatgatataaagaagctcagtgacgcaggtcatgagatagcaaaccacagcgacaagcacccgcatataaagggtatgaatgtgaatgatcttatcgccgacacaaaggaatgctcacgcaagataaagatgataacgggcaatgcgcccacgctttaccgtgcaccctacggcgagtatgacgacaaggcggtaactacgcttttcggcatgggaatgagcgttatacagtggaacaaggacagcatagactgggataagccaacacccgaaactataatagagcgtacaacgaagaatatttcgggcggttcgatcctgcttttccacaacgaccttgaaaatactacgcaggcactgccgactgtgctcaaaagtcttaaggagcagggatttgagctttgcacagtgagcgaattgttgcttgacggcgattatataatcaattcaaacggtacgatgatgcctaagagcgattctaagcagacggtaaatcagatagtgttcagcgataacgatgaagcaaacaccgcgtttgaaacgcttgccgcaaagctgagtataagcgatatcgacgctttgcagagcaaggatatttcgatagaaaccgctcagaaattagcgtcatatcttacggctgagcagatagcggcgcttaaggcgttgcccgaggaaagcttgtataacggcttcgtaaagctgaaggaagcagtatatgcgcgggagaataacacaccgggaaattcgaccgaacctataataaaggactga

SEQ ID NO: 1094 - DNA, 282 bp, Eubacterium siraeum
  misc_feature: SEQ ID N?2474498
atgaactgggtaaaattaggtatatttgcaggcggtgtagcattcggctctgtaggactgaagctcctcggcagtaaagatgctaagaaagtatatgcgcaggtcactgcggcaactcttcgcgccaaggaatcggttatgaagaccgttacaaatgttaaggaaaatgcaggtgatattctcgccgatgccaaggatatcaacgaaaagcgtgacgctaaggaagctgttatcgaggacgaatgtgactgcggttgtgaaaccgtaacagaagaagcataa

SEQ ID NO: 1095 - DNA, 681 bp, Unknown
  BMI gene
  misc_feature: SEQ ID N?2474511
atgaaaaaatttgcagggatagcggttgttatggcagctgtgatgcttacggcgtgccagaataacgttgtaaattccgacattacggaaagtacatcggagataactaagacaagcgatacagagcaaagcggcaatgacagcagggaagaaagcagtaccgaaagccttaccgaagaagagcaaatgcgcaatgagcttttcgagagagcaagtacagtaaaacaagatgacagcgaagggactatactcgaaaaaatgggcgacggatacatagtaaccggttcaggcatatcttgttatttatattatatctgtccatgggaatattttcaggttggaaacggagcgggagattttttgggatattataatttaaaatccgaagaggttgaactcaatggaaatataagtcgttttcctaaggaaatttcagataaattaagccaattgaattcggagagtacgcttgaaaatgttgaagagctctttggaaaaccttcggaaaataatgatatgtttaagttggaacttacagcagtagaaaaaggtattgaatattttggaggaaacgaggttgcgttatatttcggatacaccgacaaattaagagtgtatattgtaaacagcataatatatgttaatcgtatcggtgaccacgattatatggaagaagaatga

SEQ ID NO: 1096 - DNA, 1086 bp, Eubacterium siraeum
  misc_feature: SEQ ID N?2474613
atggtgtactttctgccgatagcgggacttgctatagtatttctgtacagcatatgcggactgaaaaacgacccgggtacaaatataataatcacatcaataaggaccgagggcaaaatccctgtcagaatggcaccgctgatattcatctcagcattcataacccatctgttcggcggttctgccggacgagagggagcggctttacagatcggcggcggactttcggcagaaatagccagacttctcaggatggacgagcgcaacggaaacctgctcgtaatgtgcggtatgagcggactgttctccgcactgttcggtacgcctgtcaccgcgactttctttgctatggaagtaataagcgtgggcgtgttctactactcagctatcgttccgtgcttcttctcggctgtcgttgcacttggaatatcgaggctgttcgggatcgtgccggttgtttataaagttccgatacccgagatcaacatcatcaatgtagcttttgctatgatattgggcgtgggcacggctttgctcagcattatattctgcttttcactgcacaagctgtcaaagctgttgtcatcgaaaataaagaacagctatatcagaatctttgcctgcggctgtgttatcgtgatactgacgctgatattcggtacggattacaacggcgcgggaatgaacatcataatggacgctatgacaggcactacacgcccggaggcatttgcactgaagcttgtattcactctgataaccattgcgggcggttacaagggcggcgaaatagtaccgtcattctttataggcgcgacattcggcaatctgtttggaacgctgttcggactgcccccgcagttcaccgccgcactcggacttgtttcgctgttctgcggagtggtaaactgccctgtgacctcgcttcttctgagcatcgagctgttcggaggagaggggattatcttctttgccgccgcctgctcggtaagctatatcctatcaggctactacggactttacaccggtcagaagataatgtactcaaagcttcacagcaagtatattaacagacatacaaaataa

SEQ ID NO: 1097 - DNA, 1302 bp, Eubacterium siraeum
  misc_feature: SEQ ID N?2474656
tttctcggctggtatgaccttaacaacagcaatgttgccgatacatataaggagcttttcggtgtgccggaaaaaataccctcagggtatgagaaaattaaataccggaagagcagttcggggagtacggctgatgaagagccgtttgtaagtataaaggtgagcaattactcagaaaggtattttgatcttgcaaagctcatacagtcagacgattcgccggacgctttcccttgcgaatcaatgttcccgtattattcgattgaccatgacagcaatttactgtttgctccggttgatgatataattgatttttcactcgccgaatttgcacagtatgagcaggcgcagaagaagacaacgatcggcaggagcaactttgcccctgtgtatgacgctaagctttcggaatatttgtggtacaaaacttctactatcaaagaaaacggtcttgaagacccgtgggagctttatgaaaaagacgaatggacgtggagcaagttcattgaaatgtcggaaaagtttacagacaaggaaaaggaaaaatatgctatagacggctatagcgcagatatatatctttggacaacgaccggcgtacctcttgtcgggctgaacgacggaaagctcgtgggtaatttcagaaacgaaaagatattaaaagccatggattttgtccgtcagtttgcaacaactcagaaaggctaccgttatccgcgggaggttgtaaataattggtcacccagctacactgagtgggcgaacggcaacactttgttctataacgacggcagttggagatatgatgaaacatggcagctctacaagaataagaataattggaacgatgatgagataagctttgttccgttcccgcgctgtgatgatgaacagacttattatcagagcataatcatcaattcgtttatgttcccgaaaggctcaaagaatgccgaggggtataagtcgcttatctatgccggctcattggcaaatagtgacaaagagcaaaagaacattgcacgtcagaatgcaaaatccgaatatggctggaccgacagattgcttgacagaatggacaggataaacgatccggcaacatttgtaccggttatagaatttaagcagatatgcagcaatccgaatcctttgtactgcggcgaaagctatatcgacgagatggacgactggtgttatatggaaggtcaggattacaaaaagaatctggaggatgaagtgaaaggggagtatgtgcctgccattgaggcatatctggaggatctgaatagcagaataaactga

SEQ ID NO: 1098 - DNA, 1089 bp, Eubacterium siraeum
  misc_feature: SEQ ID N?2474665
atgagcaggataagtaacggacagcttgtgatagcctttctggcgtgcagattatcgtccgaaatgataacgatccccagagagatggtaagctacggctttgacagatttgcggtaatactgtttgcaaaactgatcgccgcattgttgtacctgccggttatattcataacgctgaaattcaaaggcgacagcgtgataacagcggcgtttcgcagaaatcgggcattcggtataaccgcagggataattatgtcggtgcttctttccgccacagctgtgcagaccgtattgagcgtacagcgctatgttacagatacgcttctgaacaatattgtaacaatatcgggaatagcggtgataacagcatcggctgtatacggtgcggtcaaagggctgagcgccgttacaagaagctctgtctttgcggctgccgtattcggtctgctgatatttcttataggtgttactatgtgggataaggtcgagcctgattatctgtatttttcctttataaatgaccggtcgcgttttctgaaaaccctgatctccgagataagtatgaacagcgagatattgatattcgccgtaattaccgatgaactgcgcagtaaaccgtacaagaccgtaatttattacctgccgctccttttgatattgatggaatttcttaatatgctttataacctgatactcggtccttatatgacaaaggtggaatatccgctttatatcattgcgtcattgtccgatatcgtgctgtttcagcgccttgacggtatagatgccatagtctggctgatgtgcggtataataaaagccgcactgcttatttactgcataggcaggatctatacggtgtgcagtaataagccgcatacaacgcttgcggtcgcagtatccggttttttgatttttatgctctgtgtgattttaggcagtgatgccggcgtttatgaaagaatgaccaaaatcatgaacagcgggatacacatattgatcggcggcgtagttgtgccgcttgtcgtcctgatagcaggcagaacaaagcaaagagggagggtgaaaaagaatgacgaaaatatttag

SEQ ID NO: 1099 - DNA, 1119 bp, Eubacterium siraeum
  misc_feature: SEQ ID N?2474748
atgacattcagacttacggcaccgtgccatttcgggctggaaaagacgctctcgtttgaggtgcgcaaaataggcggcgaggatatagccgtatcggacggacgtgttacgttcacgggagatgagcgtgtgcttataagagccaatatgtgcctgtcgactgcggagcgcgtgggaatattgctgtcagagttcagggcgaggacctttgaggagctgtttcagggggtaaaggcaattccgatagaaaaatatgtcggcaagttcgataagttcccgataaagggcttcagcttaaattcaaagcttacaagcgttcctgcctgccagaagataatcaagaaggctatggttgaacgaatgaagagcgtatataaaatcggctactttcaggaaacggaggcgctgtttcagttccgcttctcaataatgaaggataacgtcactatgacgctcgatacatcgggcgaggggcttcataagagaggctaccgccgtttttcaaatgccgcacctataaaggaaacgcttgcggcgggtattgccgaccttgcgcggataagggacaacgatatcatctgcgatccgttctgcggaagcggcacactgcttatcgagagcgcgctcaaggcgctgaatatcccgccgtgccttgacagagagtttaccgcgatgcagtgggagttcctgcccaaagagctgtgggacgaggaaagagaagcactcagggctaatatcagaaagcccgaaaactttaagctgtacggctttgatatcgacccggaggcggtaagacttacgcgcgacaatgcggctaaggcaggtgtgggcgaatatatcgaggtaaaccggcgtgatgttgccgagtttacatatcctgagggctgtacggcagtgctttgtaacccgccttacggtgagcgtatgcttgacgaggagcaggctcatgagctgtatagagtcatgggtaagagaatgctcccgacagacggaagaagattgttcgttatcactccggacggtgagtttgaggagcttttcggcaagaaagcagataagaacagaaagctgtataacggtatgcttatgtgcaggttgtacagctatttcaaagggtga

SEQ ID NO: 1100 - DNA, 474 bp, Eubacterium siraeum
  misc_feature: SEQ ID N?2474837
atgaaacttttattcaaacaaagactattctcgtggtttgacagctacgacatttatgacgaagccggaaatactgcgttcgttgtaaaaggtgagcttgcatggggacacctgctccgtatttataactcctgcggaaaagaggtcggatatattaaggaaaaggtatttacctggcttccgaagtttgagatgtatgttgactatcgttatgtcggttgcatcagcaaagagtttacattcataagacccagattcaacattgattataacggctggcatatagacggcgactggcttgagtgggattatacgatccgtaactctgccggtcgttacatagcttctgtatccaaagaaatctggaactggacagatacctatgtgcttgacgtacaagacccgcaggatgcattgtatgttttgatgctggttcttgccatcgatgcggaaaaatgctcaagaaacgactga

SEQ ID NO: 1101 - DNA, 1095 bp, Eubacterium siraeum
  misc_feature: SEQ ID N?2474907
ttgcagttcggtgatataattaaacaggaatattttggagaaggtgttacaatgcagaagaaagccgtcaaggacaatgcccgtaagaacattatactcaaagccgcatcaaagcgctttatatccgatggatttgaggggacatcgatccgcagtataatggaagaggcaagtgccgaggtaggtctgttctactactatttcaagtctaaggacgatatatacagcgcctttatagaagatctgttcaccggctataagcaaaggatcgccgcattgaccgaaaacaccgtaagagcaccttataccgcactgaccggcgttttcggattatttgcggatgaagctcgcagattcagaacagaatatatgggcaagatgcacgaaagcacattgcgggatatccgcgaccgttcgcttgaaatatccgttccgtatataaagcgtatattggaattgcttataagctacggcgcaaagccgctcataaaaaccgatgaattggctgtgataatgacatacggcataggcaatctgtttttacgggacgaaaagagtcggcttgcaggaactcactccgaaagtatgaaaactaccgctcttttattcggacttgaccctgttgacgtatcgctgtcacttccgcgtttgccttatgtaaatgaagccgacagcattttcgatcttgccgagcattgtaaagagtgttttgcaaactacgacagcgaacgtatgaagcggttgatcaaaaaaaggatttccctcggagaagtatatatcatttctcacaaaagcattacagcaggatttgtaatgttctcaaagaaaaacaaaactctcgattttatcgccgttcaccccgactacagaaacatcggtatcgcctccagacttatcgtcaccgctatggcacagtatgacatcggagatgagctgtctatagttacattcggagatgaccgcccgcagtccgacggtgcaaaacgcctgtataacaaattcgggtttacaaatttcaaaaatattacggttcagggagtacccctcacaaagatcacagcggttatccccgaaaaagcattggtaacggaatga

SEQ ID NO: 1102 - DNA, 912 bp, Eubacterium siraeum
  misc_feature: SEQ ID N?2474915
atgtggtttaccacatcttttaatacagatagtgaaaatctgatagaatttactatatgtaataataagaaagagataaaatacaacggacttgctataaaatctgcattagagttatacggattgttaaaatacgttgtttttataccggaacacctaaatctgatcaaaggaatacccgagggcagacgagaatacctcgatagcgtagctatgatgcagactcccgtccatcttaagaagctttctcgttataacaaagcgttaaaaaataagaataatttactgtttggtatcaattttggcgatgatttatcggtaatacgtcctcagatagagagctggaacagcgttttagccgccgaagggcttaatgttacttatggtaggctgaagtacttttctcagcttgaaaagatagcttcacggctatataatgagctttcaggcggcgaggagcttaagctccggtattattcaagcatctttgacagcactgagcttaaatgtgacgcgataaacggactttacaacgaatatcttgaaagactcaatgcaagctttcagcgtgagctgaaaatgcgttataccgtacttggcgtacatcgtgacgatatgaacctgtatatcgataacaacgatgtcaaagagttcggcagtcagggacaacagagaagcacagcgcttgctttaaagcttgctgaagcagagataatccgacaaaaagatgaaacaccgataatgatacttgatgatgttttaagcgagcttgacaacaacagacaacatttcgtcctgaatcacattacggactcacaggtatttattacttgctgtaatataaatgacgtaaaagaacttgagaacggtaaaatctggaatgtaaaaagcggcacttttacggaggaatga

SEQ ID NO: 1103 - DNA, 723 bp, Eubacterium siraeum
  misc_feature: SEQ ID N?2474917
gtgacagcaggcgctaaccgcagtgtaacccacactgtaacagtcggtgacaggaagatcgtctatgagcttacccgcaagaaagtgaaaaatataaatctcaggataaagcctgacggctcggtgcacgtttcggcgtcaaattccgttactatcgctgtgatcgaacgtttcataagggaaaaggcggactttatcctgtcggcgattgataagtatagcaagcgtgataccgggagcaaaatacagtttgtgagcggggagaagcttccgatactcgggagagagcgcacgctgtatgtagtcaaggcaacacataattttgtcacggataaggacggaaatataacgctgtcggtaacggataccgacaactatgagcttaaatataaggtgtacattacttggctaaaggcccagtgttttgagataatgacactgctgtgcaaggcggcatatgatgaatactaccgctcgctcggaattaaatttcccgtgataaaggtgaaggatatgcgttcaaggtgggggagctgtataccgtcaaaagggatactcacattcaatgttcatctgacggaatatccgcttgccgccgcggaatatgtagtcgcacacgagtttacgcacttcttgcaggcaaatcacagtgcacggttttatgccgagcttgcaaaattcatgcctgactaccgcgaaagggaaaggttgttgaaagggtga

SEQ ID NO: 1104 - DNA, 1095 bp, Eubacterium siraeum
  misc_feature: SEQ ID N?2474919
atgaaaaagataacagcaatactattatgtgcggtaatgtgcgtgtttattgcgggttgcagcagcgaacccgtacaggaaagcagtgaacaacagacatcttcggatactgtaagttccgtaccggaagttcccgcaccggacggtttcagagttgaaggcacaaagcttatcgacggctatggcgaagagtttgtgatgcgcggtgtgaaccacgcttatgcatggttcaagagtgatacggataacgcgatagagggcattaaatatgtaggttcaaatacggttcgtcttgtactgtccgacggcgatcagtgggacaaggtgacaagagcggagctgaagagccttataaggaaatgcaagaaaaatcaacttgtggcagtgcttgaaatacatgacggtgccggtaaggacgatgtttctttccttaataatgcagttgattactggataggcatgaaggagctgctgaacgaaaataaggcttatgttcttgtcaatatagccaacgagtggtacggcaaatatgataagcttgaagtatggcgtgatgcctatatcgatgcggtaaagaagctgagagatgcgggcattgagaatactcttgtagtcgacagcgcaggctggggacagtgtgcggacagtgttctgaattatggtgaggagatactgaaagccgataaggacgcaaacacaatgtttgcggtgcatatgtatggtgctgccggcaagaacgagaagataatcaagaacactatcgatacggctcagagcaagaatctttgcctgcttataggtgaattcggctggaatcatacagacggcaaggttgactatgaaacgataatgcagtactcgacagagaagaatgtcggatatcttgcgtggtcgtggaagggtaacggtgatgatgtaagctatcttgacgtttcgcgcgactgggcgggcgttgacctgacatccgactggggcaagccgctggttgagggcgagtatggtataaagaagacatcgaaggtatgttcggtttatacaaagtatgcgaccgatgatgaggacagcgcagacgaggcggttgaccctgcagagtaa

SEQ ID NO: 1105 - DNA, 909 bp, Eubacterium siraeum
  misc_feature: SEQ ID N?2474986
atgaacaatcctaaatcagtatttgtggctatagcaggcagacctaatgcgggaaagtctactctcacaaattatcttgtcggtgaaaagatagcgatagtcagcgataagccgcagactaccagaacaagaataaacggtgtactcacaaagggcgaaacgcagtatgtgttcatagatacgcccggtatgcacaaggcaaagaataagctttccgatcagatgctcaaatccataagagagagcgttacggatgttgatgttatacttatgatggctgacgctactaagaagatctcgcctatagagcataatcttatcgacagcttcaaggacagaaagacagatgttattctgcttataaacaaggtcgatttaataaaggacaagtctgagcttctttcgcttatgaaggaatacagcgagctgtacgatttcaaggagatcgtcccgataagcgtaaggcagagaataggcgttgaagaaataatgcccattatcgacagatatgtaaagctgtcgccgcattattttgacgatgagcttccgactgaccaggcggaaaaggtttggcttgctgagatcgtccgtgaaaagatactccgcaatatgaacgaggagatcccgcacggaactgccgtatatgtcgaaactatggaagtaagacaaaagactaacggtaaggaaatagtcgatatcggcattgtgatcgtctgcgaaaaggcttcacacaagggtatgataatcggaaagcagggctcaatgctcaaaaagatagggtctgaggcaagagaagatatgcaggactatttcggctgtaaggtcaatatgcagatatgggtaaaggtaaaggaagactggagaaacagagagtctgacattgccgacttcggacttaaggctgactga

SEQ ID NO: 1106 - DNA, 879 bp, Eubacterium siraeum
  misc_feature: SEQ ID N?2474991
atggtgttctcatcaattcttataaaaagcggtatcggcgaaatattatttaccccgctgtggtacataatgaaattcatacttcatcttgacagaaaaatgttcagcatttttctgctaagccagataggcggttatcctgtcggagtaaaacttctgagcgagcttaaagatgccggtaaggaatatagtaaagaatacaacacggcactttgttattgctataacagcggtcccgcattcgtagtcggtattgtgggaatagggatatacggtgatgttaaggcgggacttatagtatttctgtcatgcgttgcggctaattttacagccgcagtaattacaaatgttcgaaataagccgcaaagcgggggtgatatacaattttcactttccgtaaaaaatttctctgcgtgtcttacagatgcggcaaaagcacttatgaatattacacttgctattcttttgttcaatgcaacaactgagctcataggctatataatcagtaacctgacaggttatgagctaccggatatagttaaagccatagctgaagtcactaatatcaaaaacggcgttacggtatattctttgcctgtagtcacggcgctgatttctttcggggggctttgcgtcatttatcaactgtatattttggcggctttcaagataaacgtcgttcggttcatactgacaagatctgctattgctataatttcagcactgttctgttttattatagtcggtataagcggatatgaaccctcaatcgcgacatttgcttacgcgaccgatacggtcataacagatccgcttcttttactttgcgttgccggaatgacatttgtgttgctgaaagataccgagaaaaaattttaa

SEQ ID NO: 1107 - DNA, 1494 bp, Eubacterium siraeum
  misc_feature: SEQ ID N?2475014
atgctttcagcctgcaacggttcaagcacaacaagcagttcggctgacagcggtaatgcttcaggcaatacaagctcaacggcaaacagcagtacttcaggtacggacaataattcaacggacaattcttctgcaagcaacaacggcggcagtgttgtagaagcaccttcaaacggtactacactaaagtggctcggctactatgatcttaacacagatgacaaggagatcgtagataagtttgcagatgagggctatactgtagaatatatttcaacaagctcggccgaatactttacaaagctcgcacagcttgttgcatcttccgactctccggatatggtgcgttatgagtggcagtcatatccccacggtgtagcaaacaacctttacacatcacttgacgattatgtagactttgacagcgatacatggtcgggtatgaaggatatgattgagaacttcaactacggcggcaagcattactatcttccttaccgtgtaaacgcaggtgttgttcttatctacaaccagacagctcttgacgatgagggtatcaagacagacccgctggagctttataaggaaggcaagtggacgtggactgcatggaaggatataatgactgaatggtgcaacatcggtgatgagtattacggtgtaatgcccacaggcttcgttgcaatgcctttcatagtttcgacaggtacaacgcttatcgatgttgacggtcctaacaagcagatcatcaacaacatgaaggacgctaacgttcagagatgtcaggacttcctcgcagaccttgctaaacagggcatggtcaatgcggaatatacagatcccagcacctgtcttaccgatacaaagacactgtttgcggaatttggccttgactggggctggacaacggctcaggctgcagctaaggatcaggatatcagatttgttccgataccgagagatgatcaggctgatgcatactacacaaacacagatacattcggttacctcgttcctgcaggtgcacagaatataaaggctgctctcaagtatatggagatatgccgtcttaacgaaatcgaccctgaactgattgctaagtcaaaggctgaaatgacggctgagcatctttattatcccaaatgccccgaatgcggcgtttcaactgcagacaagactttagaaaagtgccccagctgtggtgcagcacgcagagagaataaaaagcactcggcaatgtctgaggatctgtaccagatctattcagaccttaaggatacaacaagtgacaagttcacattcctctttgatgattgcttcggcttctcgacagatcttacaacaatgctccagcagggtgacagcgaaggcgcaggctgcgtcctcggcggacctttcaagctcggtgaatcctacacaagtctccgtgattcttacttcggaactgtagaatcttaccttgaaccctacagagctttaatgcagcagaactga

SEQ ID NO: 1108 - DNA, 306 bp, Eubacterium siraeum
  misc_feature: SEQ ID N?2477731
gtggtatgtgtattgacaggcggtttcagggagcttatctgcttcggaacatttgccggcatacaactgtttgattttaagatagcggctcttgaatctccgttcggcgggtttatccttgtcggtataatggcgggcacattcagagcactttacaactatctgcgcaaccgcaggataaggcagaacagtcaagagcagaacaaagcggcggcggagcggacattccgttcaagcaccgacaacacagcaaagcctgcggctctgaccgataacggcagcacaaaggagcagagcaatggataa

SEQ ID NO: 1109 - DNA, 450 bp, Eubacterium siraeum
  misc_feature: SEQ ID N?2477739
atgcctgaaaccaaggttgaaatattcagcgacggagcgtgcagcggcaatcccggtccgggagggtacggtgctattctccgttggaacggtaaagaaaaggaactcagcggcggcgaaaagcatacaacgaacaaccgtatggagcttaccggagttatcgaggcgctgtcggcactgaaatatccgtgcaaggtgatacttaccaccgacagtaagtatgttgtcgattcggtcacaaagggctgggtcaacggctggaagcgcagagggtggaaaaagtctgacaatacgcctgcgctgaatgtagatctgtgggagcggttactgccgcttcttgatacgcatgatgttgagttcagatggataaagggtcacgcaggacaccccgaaaacgaacgttgtgacaggcttgcggtaagaatgcgcgattactacagcgcgttataa

SEQ ID NO: 1110 - DNA, 414 bp, Eubacterium siraeum
  misc_feature: SEQ ID N?2477876
atgactcatgaaaagtcctgcggaggaatagtttacagaaaatttcacggcaataccgaaatattactgataaaacacgtcaaatccggctattggtcttttccgaaagggcacgttgaaaacggcgaaacagaagaggaaaccgcaaagcgtgaaataaaagaagaaaccggaatagacgtttatattgattcgggcttcagagaaacggttacatattcgccccgcaaggactcaaaaaaagatgttgtatattttgtcgcccgtgcaagaaattatgattatacccctcagcttgaagaaatttcggatatccgctgggtcggaataggacaagcacataatctgcttgtctatgataatgataaattgatagttaataaagcgaagagctttattgcacttatgaagtga

SEQ ID NO: 1111 - DNA, 1350 bp, Clostridium leptum
  misc_feature: SEQ ID N?2477983
atgagaaacaagaatttgaccggaataatcggtgtactgatatccttacccttgcttctgacatcgacgatatgcgcatcggcagaagaaaatatcgttgctgtcccgggacaaagcacagtggtcgatatcgagccctccgatacggataccacgcgcaattttgtaatagatatggctgaaatatcatcatacgcagataaaaccatcgtaagatgccttaagcaaaactgcactgtaaaaggagatatcaaggcggctaaggttgacggtgatccgataacgtcggaggatttcagctttactcttgaaccctccgataaaattcagacgataaccgtcacagacctcgatgatactgtatacacaatcaaggttcaggtaaacagcgagcatataccgcgtaacgattactatgcggactgcaccgctcccgttgtctgtgaagtctgtgaaactgtactcgttcccggtaaagagcacaaaatgagtgattattattgttctgatgagtatggacactacagagaatgtataaacgaaggctgtatttactctgaggagcctgagccgcacataacggacgaagacgacaacgactgcactacacctgtactgtgcaagatctgcggctttgcggtagtcgaagcgaaaattgaacacatttttacatataccccgaacggcgatgaagcaacacataccgcgcagtgtataaattgtgcgtacaaagaaattcagaagtgcgacctcggtatgtcgatctgctcacaaaagccgatatgtttcttgtgcggcagtccatacggagaagttgaactcggtcgtcacgccggagagataatctatcacgaagctaaggcaagtacgcatacatccgaaggaaacattgcttattatcagtgtgatagctgtcataaatgcttcatttatggtgacaacaatgcttataaagaaatagccgaagaagatacgatcataccgaaaacgaccgagcatacattctctgattggaaaacggtcaaagctccgacctgcacacagccgggctcagaagaggcagtatgcgaatgcggcgaaaccgcttcaagagaaacagaacctgtcggtcatgcgtgggataatgaatttacgatcgacaaacagcccacactcacaagcgatggcgtaaaatcgatacattgcaaaaactgcgatgcgataaagaacgaaacggtcattcctaaaaccgcaaagccttcctctcccgaaacaggcgtaaaaacaacacccatagcaatccctgcggcggcatttaccgttgcggcagtcgcgcttacagtaatgaaaatcaaaaagcataaccgataa

SEQ ID NO: 1112 - DNA, 870 bp, Eubacterium siraeum
  misc_feature: SEQ ID N?2478115
atggaaaaagtaaaaaaggcagtaatactcgcagcaggcttcggcacacgagttctccccgcaagtaaggctatccccaaggaaatgctcaatatagtggataagcctgctatacagtatatcgttgaggaggttatcaactcaggcataacagagatattgatagttctttcaagaggaaaacaggatgttgaagaccacttcgaccgcaagcccgaccttgaggctcagcttcttgcaggcggtaagaacgaattttacaaggtcgtttgcgacattgccgaaatgggcaagaatataacctatgtgcgtcagcagacacagaacggtacaggcggtgcggttatgtacgcaaagcagtttgtcggcaacgacccgtttgtagttatctacggcgacgatgttatcataggcgaagacccctgcacggcacagtgctgcagagcttacgagaagtacggcaaggcagttgtaagcatgaaggaagttccctttgagcttgtactgaagtactgcacactcgatgtaaagccgcttgaaaacaacctttacagtatctccaatatgatagagaagcccaagcccgaagaggttatttccaactttgcgatacttggcagatgcgttctccccgctaagatatttgatatccttgaaacgctccctacaggtgcaggcggcgaatatcagctgacagacgctatgaagcagctcgcgcagaccgaaggtatggtcggtgttgactttacaggtactcgttatgatatgggcaacaagctcggaataatgaaggcttgtgttgaggttgcactgaagcaccctgagataggcgaggatttcaaggcgtatcttaagacactggatatatga

SEQ ID NO: 1113 - DNA, 861 bp, Eubacterium siraeum
  misc_feature: SEQ ID N?2478163
atgcaggaagatctacttgttcagattgaaaagaggatgagcactttttcaaaaagccagaagctcatagcaaacttcatcataaacagctacgaaaaagcggcgtatatgacggcgttaaagctcggaaacgccgtgaatgtcagtgagtctacggtagtgcgttttgctatagaaatggggtttgagggctatcccgaattgcagaagagtcttcagtcgctgataaagaaccgtcttactgccgtacagcgtatcaatatcacaaatgatcgtatcggcgatgacggtattttgaaaaatacgctgacgcaggatatggatcgtatccgcagaacgcttgaagagatcgaccccaaggtctttgacacggctatcgaaaagatatgttcggcaaggagaatatacatactcggtgctatgagcagcagtatcctggcgagatttctcgactacaacttccagctgatatttgacaacgtgcactttgtacaggctatcaatacaagcggtatctatcagcagatcattcatatgaacagcgaggacgcatttatcgcgatatcattcccacgctattcacagagtacgataaaggctaccgcttatgcaaagagctgtaatgcaaatgtcgttgcaataaccgacagtgtgacttcaccgctggcatcgtatgcaaacgagctgcttatagcaaggagcgatatggcaagctttgcggactctcttgtagccccgctcagtctgctcaatgcaattatcgttgcggtaagctcaaggaacaaggacaatatcgaacagaccttcggcaagcttgaaaagctgtgggaggaaaatcaggtatacaaaaaggacgtataa

SEQ ID NO: 1114 - DNA, 831 bp, Eubacterium siraeum
  misc_feature: SEQ ID N?2478169
atggcaggaaaactatatatagtcggcactccgataggcaatctgtccgacctgtcgccacgagcgatcgaaacactcggcaaggtcgattttatagccgctgaggacacaagggtaacgcagaagctgctgacgcatttttcaataagcaagcctatggtgagctaccacaagttcagcggaaacaagcgtggtgaagatataaccgcccgcctgcttgacggtgaaacctgtgctatagtgaccgatgcaggtatgccttgcatatcagacccgggcgaagagcttgtcagagagtgtcacgaacacggagttgaaattgaaagtgtaccgggacccagtgccgcgatcacagcgctttgtatgagcggacttgacacctcacgcttcagcttcgagggctttttaagcgttaccaaaaagcaacgcgatgagcaccttgacgagatcaaggacttttcaaggacgcttatattctacgaagcgcctcacaagcttaaaaatacgcttgacgatctgtacagagttctcggtgacaggcagatagccctttgcagagagcttaccaagatacacgaggaagtgatcaagggtacgatctccgatatgatagagcgttacaaggagcttacgccgagaggtgaatatgtacttgtagtcgcgggcaaacaaaagcagaaagaaaatgaggatatttctcttgccgatgccgccgttatggctaaagagcttgttgacagcgggataaaaccgtccgatgcctgcaaacaggtcgcaggaaaaactccgttctcaaagtcggagatatataaagaatatcttaatatgtaa

SEQ ID NO: 1115 - DNA, 261 bp, Unknown
  BMI gene
  misc_feature: SEQ ID N?2479705
cgtgaggtcaactccccgatcgtgctgctgaagctcgaaggcaagttcgactgcatcgtcctcgtcgacggtggcggcaccaccggccaggccggcgccatccgcctcggcgtggcccgtgcgctcaacgccatcgatcgtgacgcgaaccgcgccgccctgaagaaagctggcttcctgacccgcgacgcccgcgtcgtggagcgcaagaaggccggtctgcacaaggctcgtcgcgctccgcagttctcgaagcgctaa

SEQ ID NO: 1116 - DNA, 591 bp, Unknown
  BMI gene
  misc_feature: SEQ ID N?2501910
atgaagattttaaggaggctgctgacggtgcttgcagcgcttgttctctttggcgtggtttgtgcggcggggctgatcggctttgtttattacaaggagacgcatctgcccccggtcggcgattttgacaccatcattgtgctcggcgcgcaggttaaggcggatggcacgccctccgtcgcgctggaaagacggctgacggcggcgctggaggaatatcaaaagcagccgatgctgatgattgtctgcggcgcgcagggcagcgacgaaccgcgcgcagagggcgacgtgatgcgcgactggctgatcgagcacggcgtggccgcgtcggatatcgaagcggaaaccggctcgttcaacacgcgtcaaaacctcggctatgcgcagtccatcatggatgcccgcgggctgacggaagcgctgattgtcaccagcgattaccatgtgccgcgcgcgctggcgctgtgcaaacaggtcggcattatcgcctgcggcaagggcagcccttccaagccggaatatttcatcaaaaaccatctgcgcgagggcctgagctggatcaaatttatgtgggagagccgctatgaataa

SEQ ID NO: 1117 - DNA, 675 bp, Eubacterium ventriosum
  misc_feature: SEQ ID N?2525616
ggtatcgatgcagttgctatgtgcgttaatgatgttgtatgtgcaggtggagagcctcttttcttccttgactacatcgcatgtggaaagaactatccagaaaagatagctacaatcgttggtggtgttgcagaaggctgccgtcagtcagaatgtgcgcttatcggtggtgaaacagcagaacatccgggtcttatgccagttgatgagtatgatgttgcaggatttgctgtaggtgttgtagacagaaaagaccttataacaggtgaaaatataaagccgggcgatacacttatcggtatagcatcaagcggtgttcattctaatggtttctcacttgtaagaagtgtatttacaatcacagaagagtcgcttaatacatattatgagtcacttggaaagacactcggagaggctttacttgctccaactaagatatatgttaagacaatgaaggaaatcaagaaggcaggcgttaaggttaagggctgcagccatatcacaggtggtggtttctatgaaaatgtacctagaatgcttccagacggtgttaaggcagtaattaagaaggacagctacgaagtaccacctatctttaagatgttacagacagatggtgagattgaagagcatatgatgtataacacatttaatatgggtatcggtcttgtactt

SEQ ID NO: 1118 - DNA, 543 bp, Clostridium thermocellum
  misc_feature: SEQ ID N?2529256
agcgtgacgagtataggcgattgggctttcggttactattatgataacgggtataaaaagatcgataacttcaagatctactgctacaccggcacagccggcgagaagtatgcaaaggataaaggttttgagtacgaacttttagatcatactcagcatactttcggcgagtggaagactgctaaggcggcaacctgcacggcagagggcacgcaggcaagaacctgcgaggtgtgcggcaaggtcgaaacacagacgataaaggcactcggtcacaaggaggttattgacaaggcagtagccgcaacctgcacaaagacaggacttacagagggcattcactgctcggtttgtgatgcggttatcaaggcacaggaagttatacccgcgacaggcaagcactcattcggcgaatggaaaaccacaaagcctgcaacctgcacggaagcaggcacacagacaagaacctgctcagtctgcggtaaggtcgaaacacagacaatagcaaaaacggctcacaattatgtgaatacagtagtaaag

SEQ ID NO: 1119 - DNA, 225 bp, Unknown
  BMI gene
  misc_feature: SEQ ID N?2529598
ttgctggaaaacagggatgaatatggaatatatccggcaaaatatggaatagcattgttgctgtcagggattaaaaagtatggcagtaacgtaatatcaggaggaagatatgagaagaatgaaaaaagttgctgcggcaacgcttacagctatgatggtagcaagtcttgcgatgggaacaacagaaacatgggcgagaagttcaaagagagcagcgtggaataa

SEQ ID NO: 1120 - DNA, 534 bp, Unknown
  BMI gene
  misc_feature: SEQ ID N?2537409
gcccgcaggcgggacttctgcggatacgacatccgcacagcgagcctcaatcaaaacctcgtcgtcgcctggtatcgggacgacaccaaccggaacgacatcgcggaggtgcgcgtcaccgcggacgggcagaacgtctatttccggatcgaaacggcggaagacgtcatcccctacgtctcgggcgacaactggatgaacattctgattcagacgggggacggcgacgtgaataccgggttcgaggggtacgactacatcgtcaaccgcgcgccggacggcgataagaccaccgtcgggagaagcgcgggcggctggaactgggaaaagacgggcgaggcggagatctccgtcagcgggaaataccttacggtgaccgtgccgctctccgcgctggggctgtcctcagacaacgtgaaattttccttcaaagtggcggacaacgtgcaaaaacccggctggtatgaagcggacgaccccgatcacgaggtcctgcattattatatcacgggggattccgcgcccatcggcagg

SEQ ID NO: 1121 - DNA, 408 bp, Unknown
  BMI gene
  misc_feature: SEQ ID N?2539499
cccgaagctgccgtcgccctctatgtcgggtgcctgctcgcgaatctgttttcggggtacgggctgcccgatattttattggggccgatcgtgtcgctcgcagcctgcctgctgacgcgcctgatctataaaaagacggagaatatctttctggcggcgctcccgcccgtgcttttgaacggatttctgatcccgctcatcttcatgatgacggggacgccctggtcggaatactgggtctgcgcggggtcccttcttttgacggaagccgtattcatctataccatcggcgtgggcgtatattattcgctgaagcgcctgcggcagagggaaatcgcttttttgttttgggatcgatcgggtaacgtcacgccatcttcgcgaagggattgtagacagcccaggtga

SEQ ID NO: 1122 - DNA, 342 bp, Faecalibacterium prausnitzii
  misc_feature: SEQ ID N?2541787
gttccgaaacagctgatcgaagcggcaaaaatcgacggagcgcggggaatcagggtactgttctcggtcatcattccgatgtgcacgcccattattttttataatctcatcaactccgtgatcacatcgctgcagatcttcgatacgtatgcaagcctcggcgtgggcccggaggagagcatgtactttatcgtcatcctcatttaccgggtgggctttgaatcctatcagatggggtttgcctgcgcggtggcatggatgctgttcgtcgtgatcgcgctgctcacgctcgtcatgttcaagacgcagaaatgggtggtgtacctggatgaggagagctga

SEQ ID NO: 1123 - DNA, 669 bp, Unknown
  BMI gene
  misc_feature: SEQ ID N?2544447
atgacggcaaatatcaatgaaaaaacggtaaagctgcctccggtccgggtatttcgcggggatgacggcggagatacgatcacctttgaatgcgcgcgcgcatacggggcgctggatctctccgccgcttccgctttcatgaaattcctgcggtcggactggtacgcggaaaaagtgcccctgcaaaagagcgcggacgaaacggccgtccggtttgactggaagatcgacaaaaagcagaccgcggtcgcggggccgctcagaatgcaggtcgtgttcgagggagaggacttcgtctttcagacggaggtctttacgctggacgtgctcccttcgctgacgggggcggaatacgaaacgagggaggattttatggcattggtggaaaaacagctggcgggctacgtaaagcgcgccgaaatggaagcgtttgtggaggaaaagctgggaggagcggcggcgcccgacctttcggaatacgtgaaggagtcgcagctggagcagtacgcgcaaaagagcgaactttcggcgcttgcgaccaaagaggagctgacaggttacgccacggcggacgatctgagcggttatgcgacggcggaagacattgcgggattcgtgaccgagagcgagctctccggcgcgatcgcggggctgaacagcgcgatggag

SEQ ID NO: 1124 - DNA, 1101 bp, Unknown
  BMI gene
  misc_feature: SEQ ID N?2564507
atgaaaggcaatcaattaatgagaaagcccaaattactcagggcgcttttgattcttttgtttgtagcggcacctatgcaatggacacgcgcacaaatcgttctttccactcccaagacaacactgggggcagtaatcaagaacattaaatcacagtcaaactatcagtttttctatgatgataagctggcggaaacgccggtaaatgccattgatgtaaagaatggctcattgcagaccgtattggatgaagcattgaaaggcaaaggtattacttacaagatagaagataatatcgtctatctgtctgcacccgaaactgctcaggctccccagcaaacaggacaagaacgtaccattaccggaacagtagtagatgctacaggtgaagccttgattggtgtaaacgtacaggtgaaaggaaaccctacagccggtaccattaccgatttcgatggaaattattcattgtctgttccaggaaatggagaaatcgtattctcatacattggttaccgttcggaaactttgaagcccgatgctaaaagtgtcttgaacgtgaccatgaaggaggatacccagacaattggtgaagttgttgttacagctttgggtatcaaacgtgaaaagaaaatgttgggttactctgttcaggaattgaagggtgacgaactgaacaagacaggagatccttctgttaccggtgctttgcaaggtaaggtggcaggtcttcagatgaatacatcagcaactggtttgggcggttctacgaagataaccattcgtggtaactcatccttgacagacaataaccagccgttgtggattgtagacggcgttccgttcagcgacaacagtacttcggatgcttctcgttatggtggtgtggaccgtggtagtgcttcaatggatatcaatccggacgatatcgaaagtatttctgtattgaaaggtcccaatgcggcagctctttacggatcacgtgccggtaacggtgtcatcctcatcactaccaagaaaggtacgaagaaagacggtttcggaattcgttatagcggtaatttcacctggacttccatcgccgagactctggatatgcag

SEQ ID NO: 1125 - DNA, 279 bp, Unknown
  BMI gene
  misc_feature: SEQ ID N?2568292
atgaaagcatttgaattcaaaccgaagctcttcacgacattacagaattattccaaagagggcttcatggccgacctcatggccggcatcatcgtaggtattgttgccctgccgctggctattgcattcggcattgcatcgggagtatctccggagaaaggcattatcactgctattgtggcaggattcatcatttccttactaggaggaagcaaggtacagattggcggtcctacaggagcatttatcgtcattatttatggcatcacccaggaatag

SEQ ID NO: 1126 - DNA, 3327 bp, Bacteroides pectinophilus
  misc_feature: SEQ ID N?2582519
ggatataaggcatggcagaagaattttgagcgccatgtgaacaagggagagaggggtatccgtatccttgcgccttcaccttacaaaatcaaagaggaacaggaaaagattgatccggtcacgaatgagcctgtgcttgaccgggacgggatgcccgtcatggaggaagtggagataaagatacccgccttccgggttgtcacagtgtttgattattcgcagacggacgggaaagagcttcccggacttggtgtgagcgagctgcatgggaatgtagagcgttaccgggattttatggaagcacttgcaagggtttcccccgtaccaatccggtatgagggcatggagggtgacaggaaaggatattttattgatttaaaccaccctatcgctattaaggagggtatgggagaagcgcagactgcaaaaaccggggtgcatgaggtggcgcacgcaaaactccatgcaaaggaggttgaacaggaaacagggattgccaaagacagggaaacaaaagaagtggaagcggagagcatcgcctacactgtctgccagcatttcgggattgatacgtccgactattcttttgggtatatcgtcgggtggagcagcggaaaagaaatgccagagttaaaatcttcccttgatacgatacgccggacttcctcggagttgataaaggggattgaagcacagcttttggagattgataaagaacgtgctgcagaacaggcacaggaggacattattctgcttgtggcgaatacagaccgttcagaatatgaccttttgagcgttaagggcatggagcggacagaacttcttaattctttgcgtaccatgaaagacgatgacaggcagagcgtggaagcctaccttgaaagagccggggcgtgggtaactctgcttggaaatgagcggagcgaggaagtggaggaataccacttagattatgcttacaatacagatacttatgagataactgattttaaggcgttgcaggaagaaaatgccttaaaaggcatggaaaaggcaaataaaccgattgagtacgctgatgtggttgtgagaatctccatgccggacagcggggaatatgaaactattaaaatcacaaatatgcagtcagaagtgcagaacaccctctatgacatactgatgcgtgaaacggacgtagagggcggaaacgttctggactttctgaaggagaaagggtttgattttgtgccgattatgagaagcggaggcttaaatgacggctatccacaattctatgactttgatatggatttgacggaaaaggaacttcatattgcttcggagcttccgacaataatgcaggcagaacagcttattaaccgcatggaatttcacaggacggtttatgacagtgatgagcgcaatttgattatgaaccacgcttataagctggatgatatgtataagacaacttccctggcatattcccttgcggagcagaaagacgatttaccgcttcttttggaaacaatcaaggcagcggagaaagaaattgatgcccttccggatggcatggtggggttatcggagatgcacgaatatgggtattcctggaatgaaatgctccctctgacaaaggacaatgcatcggagctgttcggggaagatgtgtcagtgtaccagctccatgcagacggttcagaaacgctcgtggaggacagagcggcattacaggcgcatgacggtctgttcggcgtagaaaaggacgattggagcgcctatctggagtttcagtccatgaaacaggaattagaggacagtgaacccaaccgggaagcacagcttttatatggtaatgagggaaggtttggcatctatcagcttaaagatacggagaaaacaagggatattcgttttatgtcgatggattatcttgaaatgaaaggtatcccggtttccagagagaattacgagctggtctataccggggagcttgcggagggcatgagccttgaagatatttttaccaagttcaacatagaccacccggcagactttaccggacattccctttctgtcagcgatgtggtggtgctgcatcaggatggggagaacacaagccattatgtggattctgtcggttacagggaagtgccagagtttacaagggagactgcattatcagcggaagtcagtgaggaaaaggattctgttatggaaacagcggcagaagtgccggagggaatggcagaaggcagcgcacaggaagaaccggacgctgataaggtatcttactatgttattgaagatttatccacatgggcggacggaagcccggaaaagagcagattagagcgttttgacagccttccggaagcaatggggaagtttgcggaatatcggggaaaggatatggaagataagccggatatggcaaggacaacatttggcgtcaatgtcaatggcagcgagtttgatgtaatccatgtcaggaataatgaaaactgcctttcgcttgattttacgcatagcaaggcggcgggggaaagcagccgcttcatgggagatttgcagactttatatgatgaggtcgattttgacaaggtaagggttcaccgggaaatgtcaccggaggaaataaaggattttgtaaaacagcggtttgagcatcagctaaagagcagtggtcttgatgatgtttccctttatatggacaggtttgacattctctatgaacaggggaaaatggagaaccttatgccgacagctaaccagaagcatatcgtggaagatgtaccgttcatggagtgggaaaacccatacatagataccagtgacagggaaattggcagggaagaaacggaacttgctttccagttggcagaccgctatatcagtattcaggaagccagcgaagggtatgattacacaatttatgatatgaattaccgggagttggacggtggcgtgtatgacaatccagatataacaatcagacaggcacttgatgagattgtggcagacttgaaagagccgacacaccggggcactctggaaggcagcatacaggcggatgatgaactgataccgattgattatgacggattggtggaaaaagcagagcaggcggaaatggagcatcttgaggaacgtatcagagaggaagtgccggaagcggcggaaagcagggttatagccgattttaaagcccggacagaggaattatggaatggcatcaatgggcagacacaggaagatatagaacttaccgtatacgcctatttgcagtccaaaatagacgagtatgacatggacatagagcttgtggatgtggcggggggcgggggg

SEQ ID NO: 1127 - DNA, 519 bp, Unknown
  BMI gene
  misc_feature: SEQ ID N?2594366
cttgttcatttcggcggtaacacttattgcacccgtgagcacgacagcttgaagatttcaaacggcaaatggtgttggttttcccgtgggatcggcggctattctgcgctggactatctaatcaaggtcaaagaaatgccgtttatgcaggcggttgaaacgattatggggaatgttgcggtatcgccgccgacctatacccccgcgccaaaggaacagaagccgaaagttttgctattgccaaaagctaaccgttgtgccacccacgccgtcgaatatctgcatgggcgaggtatcgactactatctgatagatttatgtatcagtacggggcggctgtatgaaagctatccctatcacaatgtcgtatttatcgggcaggatcgggacggcaaaccccgctatgccaatctgcgcggtatcggctcggactttatcggggacgcaaacggcagcgacaagcattattcctttgggattcccgccgcctttgaaagcgacacgctgaatctctttgaa

SEQ ID NO: 1128 - DNA, 870 bp, Bacteroides capillosus
  misc_feature: SEQ ID N?2628214
atgctgtatatcagcagctttacttttggtggcggctttgtcattgcaaccttcatgaagaaaaaattcgtggacgagctccattggattgacgaaaaagaaatgttggacataaccgctctggcgcagtcctcgccgggtgctatcgcagtaaatgttgccattcttgtcggctggcaggttgacggactactgggaatgcttcttgctgtattaggcacaatcattcctcccatggtaactttatctgtcatttcattattttacgcggcatttgcctccaatgtctatgttgcatttgcattaaaaggtatgcaagcaggcgttgcccaatataagctgaacccggaggattttatcatcaaggcggggaaaatcatcaacaaccaaaaggcggatatgattattgagcatatcacctacaacaggctggaagaatcgtacagcgccgacatctttatgctggcaaacctgcacggcagacagggcgtaaacgccatgcccgctgaccgcagcctgtacaattatgtgatttacgattccgacaacgagcgccgctttgcccacgagctggatgtttgcgacaaaattgccgtgtatgtcaagctgcccgccagctttttcatcagcacgccggtaggcaagtacaacccggactgggcgatcgccttccacgagggaacggtcaagcatatctattttattgccgaaaccaaaggcacgacactgcttgaccgcaatgagctgcgtggcgttgaggacctaaagattcaatgcgccaaagcccactttgccgccatcagcaacgacagcgtcatctacgatgtggtggacagctacgataagctgatgcaggtggttatggaataa

SEQ ID NO: 1129 - DNA, 327 bp, Unknown
  BMI gene
  misc_feature: SEQ ID N?2632187
atgtatatatgtaaagattgttttcttgatgaagaattacgttccgaaataaatgccaatgctgttatcaatggcgtatgtgatgtatgtggaaaagaaggaaagttaatggacttctcagattttcatggtttctttaatgctttactttcactattttccttaacagataacagcaacaaaacaatagttgatattattcaagacgagtggcatatctttaaagataaagatgttgcaaaaattttattatctgatattatatctacatcccatttggactactctatagatacttgtgtagattacacaaatgaaatccaagat

SEQ ID NO: 1130 - DNA, 564 bp, Unknown
  BMI gene
  misc_feature: SEQ ID N?2633339
atgctgtatatcagtaaggaaggaaacagagcgatgagcaggcaaatactaaaaaaagaacatatcattacagatagattgacattaggtccttatcgtaaagaagacagagagcgtctcacagaaatgatgcgtaatccagagattacgtcaacatttatggtgcccgattattccgaagaagtacagttttatacgttggctgacaaactgatcgaattcagtcagattaaagatacagcccatctcgaatatggcatctatctggacggttatatgattggatttgtcaacgattgcggttatgacgatgaaactattgaattgggatatgtcattgacccagcttttaaggggcggggatttgcaacggaagcggtgaatgcagtaataaacgaattacatgagatgggttttaaaaaggtcgtggctagcttttttgaaggaaatatcggcagcagaacagtgatggaaaagtgcggcatgcatctaaacggaaactcagattatgaggaataccgcggaaagaaatataagtgctatgagtgtgaaatggagctctaa

SEQ ID NO: 1131 - DNA, 1218 bp, Bacteroides capillosus
  misc_feature: SEQ ID N?2634585
atgctgggcggcaacgccgagtatctggccaagaacgacctgcgcaagcagggcatggacgacgagctgattgccgaagccaccggctacgccgacaccgacaatcaggagattctggacgcccgcaagctgttcgccgagcggctccagaagcacaaggacgagatcgccggcgaagccgagcgcgtccgtcaggccggcggattgttcatcatcggcacagagcggcacgactcccgccgtatcgataaccagctgcgcggccgtgccggccgtcagggcgaccccggcgagacccggttctatctctcgctggaggacgatttgatgcgtctgttcggcgtcgagcggatcaccaatatgatggatcgccttcaggtggacgaggatatgcccattgagaacaagctcctcaccaagtccatccagcaggctcagaccactgtggagagccgcaacttccagacccgtaagtctgtgctggagtacgacgacgtgatgaacaagcagcgcgagatcatctacggtcagcgcaagcaggtgctggacggtctggacgtgaaggagaccatcatgaacatgatgtccacctccatcaccaatcaggtgaactccgtcttcctgtcccagccccacatcgacgcggcacagtgcaaggagctgctgcggggcgtggagggtctctacttccccaagtatgccgtgaagatcaccgaggaggagctgccttccctgaccgccgacgagctggcccagcggttcatcaccgccgccgccgacttctacgagaagaaggagcaggaattcacctcccccgttatgcgtgaggtggagcgcgtggtgctgctgcgggtggtcgacgagtactggatggagcacatcgacgccatggacgatctgcgtcagggcatccgcctgcgtgcctacgcccagaccaaccccgttgacgcctataagaaggaaagccttgagatgttcgaggagatgatctccgccattcaggaggagactgtccggcgtctgtacagcgtccgcatccagcgcaacgaggagatcaagcgcgagcgggtggccaagggcatgaccgagaacgtgggcggcgacggcaccgtgaagaagcagcccaagaaggtggtcaagatcggccgcaacgacctgtgcccctgcggcagcgggttgaagtggaagaagtgcgactgcaaggagtatcactcctga

SEQ ID NO: 1132 - DNA, 1068 bp, Clostridium tetani
  misc_feature: SEQ ID N?2634594
atggaacgagcagacaagggccttgcctttatgatgcagtatgaaaacgtggcgtggtacgatggcggcgaggtgcgcattctggatcgccgggtgtatccacggcgggtgcaattcgtcacctgccgcacccacagagaggtggcgcaggcgctgacggacatggtgacccagtccaccggccccttcaccgccgccgccatgggtatggcgctggcggcctgggagtgccgggacaggacggcggagcagcaggtggcctatctggagcaggccatggacaccatctcccacgcccggcccaccaccgtgggacggatgcagctgatctgcggcggctgtctggaggtggcaaaggctgccatcgcgcagggcgtgcctgatgtggcactggccatccggaactacacggtggccaccaacaaccggcgctatagccgggtgggccagatggcaaagcatctggtggacaaatttcctgacaacggcaccgtcatgacccagtgcttcggcgagaccatcgtggccatgatgctgaaggagtgccgggagcagagcaagaacatccgcctgttctgcccggagacgcggccctattttcagggcgcacggctgacggccaccgtgtgtcacgacatggggtttgacgtgacggtcattaccgacaacatgcccgcctacgtgatgcagcaggagcatgtggacgtgttcacctgtgccgccgacgccatctgctgcgacggctacatcgccaacaaggtgggcaccttccagatctccattgctgccaattatctgggcgtgccggtgtacatcagcggcattcccgacaagggccaccccaccgtggataccgtacacatcgagatgcggaacccgcaggatacgctggaggccatgggggtaaagaccgccgccgacggggtgaagggctactatcccgccttcgatatcacgccgccacagctcatcaccggtgtggtgacggatcttggcatctattccccctatgaactgaaaaaatatctggaggtcagtgaactcggcccctatgaaatggtagtttaa

SEQ ID NO: 1133 - DNA, 1215 bp, Unknown
  BMI gene
  misc_feature: SEQ ID N?2634673
atggataagatcaagatgacaacgccgctggtggagatggacggcgacgagatgacccgcgtgctgtggcagatgatcaaggacgggctgatcctgccctttgtggacttaaagaccgagtactatgatctgggcctgctgcaccggaacgagacaaaggatcaggtgaccatcgacgccgccaaggctacggcgcgcctgggcgtagcggtgaaatgcgccaccatcacccccaacaagcagcggatggaggaatatccccagctgacggagatgtggaagagccccaacggtaccatccgcgcctatctggacggcactgctttccgggctcccatcgtggtgcccttcatccacccggtggtgaagaactgggaaaagcccatcaccgtggcccgtcacgcctacggcgacatgtacaaggccgtggacatggtgacggacgagcccggcaccgccaccctgaccttcaagggcgagagcggcgcggaaaagactctgacggtgcagaccgtcagcggccccgccgtgtggcagggccagcacaacacggaaaagagtatccgcgcctttgccaagagctgcttccagttcgccgtggacaacaagcaggatctgtggttctccaccaaggacaccatctccaaggtgtacgacggcgagttcaagcgcatctttgaagaggaatacgagcagaactacaaggcccaatttgaaacgctgggcatcacctatttctacaccctcatcgacgacgcggtggcacgggtgatccgctccaagggcggctttatctgggcgctgaagaactacgacggcgacgtgatgagcgacatgatctccaccgccttcggctctctggccatgatgacctccgtgctggtgtcccccgacggcaccaccgagttcgaggccgcccacggcaccgtgacccgccactactacaagtacctcaagggcgaggccacctccaccaaccccatggccaccatctttgcctggacaggcgccctgcgcaagcggggacagctggacggtctggatgatctggccgcctttgccgacaagctggaggccgcttgcctcgccacgctggagcagggcaccatgaccaaggatctggccggtctggtggacgagggctttacggctcacgccgttacctccgcccagtttatcgccgccatccggcagaatctggaggctgcgctgtaa

SEQ ID NO: 1134 - DNA, 828 bp, Bacteroides capillosus
  misc_feature: SEQ ID N?2635407
atgacatatttttcttccttcctgctggggctggtacagggcatcgcggagttcctgcccatctccagctccggccatctgtccatcgcccagaacctgctgaacatcgacacggcggtgccggagttctttgacgtgctgctgcatctgggcacgctggtggcggtgttcgtggcttactggcgggatatctgcgacatggtgatggagctgatccacggcgtcaacgatctggcccacggcacaacgccccgccaggtgccgcccgcccggcggctgatcctgctgattatcgtgggcacgctgccgctgttcgccgtcctgcccatccataagcaggtgcaggccctcagcaacaacatgatcttcatcggcgcggcgctggtggtgacgggcttcctgctgttcgcctgcgatctggtacgcaagggccgcaagaccgagcgcaatgccacactggcggatgtgctggtagtgggcggggggcaggccatcgccaccatgcccggcatctcccgctccggcatgaccatcaccaccggctgcttcatgggctttgagcggaagtttgccgtgcggttttccttcctgctgtccattcccgccgtgctgggcgccaacatcctcagtttgaaggatgccatcgagaccgggatcgtctgggcggaggtgcccatgtatctggtgggcgttgtcaccgccgcagtggtgggctatgtttgcatccgtttgctgcgcatggtggccgaaaagggccgcttcggcgcgtttgcgtattactgctgggcggcgggcctgctgacgctactgctcaacgccattaagtga

SEQ ID NO: 1135 - DNA, 1071 bp, Bacteroides capillosus
  misc_feature: SEQ ID N?2636230
atgctgaattacatgaatgagtacgaaaagtggctgcatagcggcgcactgacggcggacgaggtgaaggagcttcagtccatcgccgggaacgaaaaggagatcgagagccggttttacggcccgctggagttcggcacagcgggactgcggggcaccatgaaggtgggtctgcaccagatgaacgtgtacgtgatccgctgggccacccagggctttgccaacgtgatctgcgccgagggcgaggacgccaaaaagcggggcgtggccatctgcatggactgccgccaccactccatggagtttgcccgggccgccgccgaggtatgcgccgccaacggcatccatgtgcggatcttcgagtctctgcgtcccaccccggagctgagcttcgccgtgcgggagtatggctggcaggcgggcatcaacgtcaccgccagccacaaccccaaggaatacaacggctataaggtttactgggaggacggtgcgcagctgccgccccaccacgccgccgccatcgccgccgagctggagaagattgacatcttcaccggcgtgaagcgcatggactttgacgaggccgtcaaggcgggcctcatcgagaccatgggcgacgagaccgaccgcaaattcatggcaaatgtcatggatatggtcaacgattacgattccgtcgccaaggtggcggataccttccaggtggtgtatacccctttccacggctgcggctataagctggtgccggaggctctgacccgtctgggtatcaggcatttgcactgcgtgccggagcagatggtcattgacggcgatttccccacggtggtatctcccaacccggagaaccccgagggcttctatctggccattgcgctggccgacaaggtgaaggccgacttcatcgtgggcaccgacccagacagcgaccgcgtgggcattatggtgcgaaataaggagggcaagttccagcctgtcagcggcaaccagaccggcgtactgctgagcgattacctgtacggcgccatgaagcgcagcggtaagctgccgaaaaaccccgtgatgctgaaa

SEQ ID NO: 1136 - DNA, 573 bp, Alistipes putredinis
  misc_feature: SEQ ID N?2637449
atgcaagccattatcaatttttgcgagcaaaccggtttttaccagtttttccagggcgataactggaaatgcgccatcatgatcgtggtggccatcgtgctgctgtttctgggcatcgtcaagaagtttgagccgctgctgctggtgcctatcgccgtcggcatgctggtgaccaacctgcccggcgcggagatgtatcacgagatcctgttcgccggcggacacatccactgggatctgttcggcggcaaccccatcacggcggggtttatcgccgagatgcaggcttccggcgtttccgaagcggtgctcaacggcgtcgccgtgggacagacggtctccgtgggtctgatcgacgtgctgtatctgggcatcaagctgggcatctatccctgcctgatcttcatgggcgtgggcgccatcaccgactttggccccctgctcagtaatcccaagagcctgctgctgggcgctgccgcgcagctgggcatcttcctgacctacgtgggctgccgcctgagtggcctgttcaccggtgcggaggctgcctctatcggcattatcggcggcgcg

SEQ ID NO: 1137 - DNA, 1083 bp, Anaerostipes caccae
  misc_feature: SEQ ID N?2639825
atgtaccgggtgacgaaacgagacggaaccatcgctgaatttgacatcgccaagatcagctctgctattaccaaggcctttgatgccatgggcaagcagtatcatcccagcgtcatggacatgctggccctgcgggtcacggcggagttcgagccgaagatcaaggacgagctggtggccgttgaggatattcaggactgcgtggaaaaggtgctgagcgaggcgggctacgccgacgtggccaaggcctacatcctgtaccgcaagcagcgggagaaggtccgcaacgtgggcagcgctctgctgaactacaaggatctggtggacaactatttgcagatcaacgactggcgggtgaaggagaactccaccgttacctattccgtgggcggtctgatcctgtccaactccggcgccatcaccgccaactactggctcagcgagatctatgaccccgaggtggccgaggcgcaccgcaacgccgacctgcacctgcacgatctgagcatgctgaccggctattgtgccggttggagcctgaagcagctgatccaggagggtctgggcggcgtggtcggcaagatcacgtcctcccccgccagccatctgagcaccctgtgcaaccagatggtgaacttcctgggcatcatgcagaacgagtgggcgggcgcgcaggcgttctcctccttcgacacctatctggctccctttgtcaaggtggacaacctgacccagaaggaagtcaagcagtgcatccagtccttcgtttacggcgtcaacacaccctcccgctggggtacgcaggcgcccttcagcaacatcacgctggactggaccgtgccccgcgatctggcggatcagcccgccatcgtgggcggccgggagcgtgagtttacctatggcgactgccagaaggaaatggacatggtgaacaaggccttcatcgatatcaggcttgagggcgacgccgacggccggggcttccagtaccccattcccacctattccatcacccgcgacttcgactggagcgagagcgagaacaacaagctgctgttcgagatgaccgccaagtacggcacg

SEQ ID NO: 1138 - DNA, 675 bp, Unknown
  BMI gene
  misc_feature: SEQ ID N?2641942
atgatctggtgtgtggaggatgacagcggcatccgcgagatcgaggtgtataccctgaattccaccgggttcgaggcccggggctttgccgacggcgcatccttccgggaagcgctggagaccgagacaccggagctggtgctgctggacgtaatgctgcccggcgaggacggggtgtcgctgctgcgctatctgcggcagatgcctcggacgcgggagattcccgttatcatggccacggccaagggcatggagtacgacaagatccagagtctcgacatgggagccgacgactatctggtaaagcccttcggcatgatggagatggtttcacgggtgaaggcggtgctgcggcgctgcgccccggtcaagcagagccgccagctgtccagcggcggcgtgacgctggatctggacggccataccgtcacggcggcaggccagcgggtgacgctgaccttcaaggaattcgcgctgttgcagctgtttctggcccaccccggcatggcctttacccgcgaccagctgtttaacgatgtgtggggcgccgattacgtaggcgagacccgcacagtggatatgcacatccgtaccctgcggcagaagctgggcgagtgcggcgaccgcatcgaaacggtgcggggcgtaggctatcgatgggaggcgcggccatga

SEQ ID NO: 1139 - DNA, 3009 bp, Unknown
  BMI gene
  misc_feature: SEQ ID N?2644831
atggagcattcacacatgcacaaaaccgacaaggcaggaaacaagagaatatggctttttgtcgcgctgggcgtgctgctgttgctgtccgtttttcgggccctcggctttgtgaccgaggcgctggcgctggagcagcagccccgctgcggcatgaccgagcatcttcacacggagtcctgctacatcaacgatgtgctggtctgccgccagaaggcccacacccactccgacagctgctatcccttgctgctggcggacaacgacatcaaccagctgctgacgcagatcgcctccacccgcgacagaagcctggaaagcctgctgcgctccggcaacgtgcgcggcattctggtgctgaacaaggatctccgggtgcagaccacgcaggaggacaacgccgaagcggattacccgtggatcggcggcgtgggactgctggccgtcaacgacacgcccagcaccgcctccaacgccatcaacttctacatccggctggacgggaatatcacctgcatcggcagcaagaccctgaccaccagccgaaatatccgccagctctcaaaaaccaatgtggtcagcgcctataccgccgtggtggaggcgtcactgaccaccggtaatctgcaaagcagctactacctgcgctacaacaccaccggcagcacaacgagcttttccagcaccgccggagcctccggcagcaatctcaccttcggcaatggcagcagcgcacgctacgcgctgctcacctcccgttccggcaatacctacacccccatcgacttctataccctgacgctggactactccgccgccgtcggcggcagcagcttctactacgtggaatccggccttggctatacgctgcccactctgaacggctatcactgggaagacggcgacggcaataccgtcaccacagtcaccatcacgcgtcccaccacggtatacgcaagacccgacgcctgcaccgtgatctactacgtggacggcatggaatacgcccgcgacgagaacctgcgccctaacacagcctacaccctgcgggacgttcccgacggctgggagggctggcggggcgatgacggcacggtgcggaaaaccggcacgcagatgaccctgaccggctccatgaccttccacgcggtgaaatacgtcaccgtcaccttccgccatctggacggcagcacctccacacagcaggtgctgcagggcgaccagctgaccctgcccggcggctactggagcgacgaggcgggcacagcctacaccggcggcagcgccgtcaccatcaacggcgacgctacctttatccagacctccggccctcccctgaccgtgacctacaccgtcaactgggccacaccctccgggctgaacgcgcccgccaccattcccaacatcgtgggcgcaagcagctacacggtggccgctgacggctctcatatggtcagccgggtgtccggccgcaccgtcacctgcgcctttaccaacgtcaccaaccgctacggcagcgtctacttcgccgggtggcagacggagaccggcgagatcatcctgcccgacgcccagctgacatgggacgagctgaagctctacgacgccgacaacgacggcgtgacctccctgacgggtctgtggaagtaccacatgctgcaaagcgtcaacttcttcgtgaagctgaactccgcccacagcagcggcgagaccggatcggagtactacacgccggtgatcttcaccacctatgtaggcggtatcgacagcgagatcggcagcggcgcgtcctccggctatgtggacgcgctgaacgaaaaatacgccgtcgagatgacggccgacaccacctatctggccaacgaccgccttatccgcgccatgtttggcagcgataccgccccgtggctggcggagctgccccacgacaacgacattttccagcagctgaaggcctacgtacaggacggcggccagctgagcgtccccaacgaggcgggtgagttcgtcaccgtcgatgtcaacgacctgaacgaatacggctacgccatccgctggtacgccttcaaggcttgcagcgacggcggcaacgtctacgactggcacgtggacggcgtgctggtgcgcaaggagggccgcgtccacaccaccaaaaccttctccggcaacgaaacgctgatccatcaggcgcgggacggcttcttcattcacgccgtcaacgaagcccaggacacgcgctacatcatgaccatcaccgaccccaccgacgacgagcgcgccgccattctcgaccggctgggcctgtccgcttcgcagatcaccggctggctcacccccattgacgacggcgacggaaacgacaacaccctcctgtgggaattccgggatgtggagtatgacgaggcgtgggtcatcaccgagtatcccccgcaggtggcggaatcggcggattacgccgagtgggtggtggtggactcctccgcctccaaccagtccgcttccggcatcggcggcaccgtggagatcagaggcgttacccacgccactgatctggaggaccccgagtggctgcgggcggaattcaacaacatctacttccgaggcaactccctgatgctgaaaaaagaggacgccgccaccggacaggcgctgtccggcgcacgcttccagctatatcagggcgacaccctcatgaccttcgattacgacgcggacaccggcctttacgtctttgacagtcacggcaacggttccatcgacacgctggtctgcgatggctacaccaacctgtccaccagcggctttgcctacgacatgggcgatatcaccgtgcgggaggtcaccgcgccggagggctacggcgcggtgggcgacgtgaccatcggctatactcaggacaccgacggcgacggtgtgcccgatagcaccatcggcattaccaacagcgccgacagcggcgcttacgcccgctatgacagcggcctgctggtgatccgcaacagctccgcg

SEQ ID NO: 1140 - DNA, 846 bp, Bacteroides capillosus
  misc_feature: SEQ ID N?2645558
atgagttatatcgatgtaacaggcaagaccgaggaagaggccatcagcaaggctcttgcccagctaggcatggatcgtgacgatgtgtccgtggagatcctggagcgtgccaagaacggctttctgggtatgggcgccaagcctgcccgcgtccgcgtgacctacggccccgacgaggctcccatggaggaggtcgccgtgcccgtcaagcctgttgtggaaaaggtcgagaagaaggaagagccgaagccccggccccagaagccccagcagtccaagcctcagcagccccgtcccaccaagccccgccgtgaggaaaagcctgccgaggccgctgcggaagcccctgccgctcccgctgtggagctgccggagtgccatgacgacaatgcccagcgcatcaccgcgttcctgaccggtctgctggagcatatggagagccccgccgctgtgaaggtgtacgaggaggagaagggccggtacaaggccattctggagggtcagaagctgggcgcgctgatcggccgccgcggtgagacgctggacgccatccagcagctgaccaactacgccgtcaacagcggcagcgagaagcgaatccgcgtccatgtggacgccgagaactatcgcgcccgccgggaagccagtctggagagcctggccatgaaggtggccgccaaggtgaagaagtatcgccgcagcgtcacgctggaggccatgaacgcctacgagcgccatgtgatccacgccgccctgcaggacgtgaagggcgtcaccacctattcggtgggcaccgagcccaaccgccgcgtggtggtggcctacgaccgcagcgagaacaactga

SEQ ID NO: 1141 - DNA, 513 bp, Unknown
  BMI gene
  misc_feature: SEQ ID N?2651546
ccggatggttcgatcaaaaacactaacaatatgtggatttcgattatcaatgatagaggtgtggtgacacatgaggattggacagatcgatttaacaagctccgtgaagctgttggatgtccatatcctgggtatatgattcatgaggcgattacctggtctccagttcgtcgtcaatgggtaattctgcctcgtcgtgtgagcaaggaagcttatgacgagaatgaagatgaacgtcgcggctcgaatactgtgatttttgcttcagaggacttcagcaagattgaggtgaagcacatcactccattgacgccgacacgaggtttttctgacttcaaattcctgcctggttcaaaggaccaaattattgtggctctgaagagtgaaggggatgaggaggcacagactcagaatacatacatcacagtatttgatgtgaatggaaagatcttgatggaagagacagagattccaggaatgatgaagtttgagggattagagtttagagtataa

SEQ ID NO: 1142 - DNA, 855 bp, Unknown
  BMI gene
  misc_feature: SEQ ID N?2651799
gtcgcccgcgcgctgcgccgcgcccgcgcgggactgcgcgatccgaagcggcccgtcggctcgtttctctttctcggccccacgggcgtgggcaaaacggagctgtgccgcgcgctggccgacgcggtgttcggcgacgaggaggcgctggggcgcctggatatgtcggagtatatggagccgtcgagcgtctcgcgcctgctcggcgcgccgccgggctacgtcggctacgacgagggcgggcagctgaccgagaaggtgcgccgccgcccgtggtcggtggtgctcttcgacgagatcgaaaaggcgcacgaggacgtgtggaatctgctgctgcaaattttggaggacggtgtgctgaccgacgcgcaggggcggcgcgtggacttccgcaatacggtgctcgtcatgacctcgaacgtgggcgcgaaggccatcacgtcgagcgcggcgaagctcggcttcgcgcaggccgaggacggcgacggcggcgatgcgcgtgtgaaggaaacggtcatggctgagctgagggcgaccttcaagccggaatttctcaaccgcgtcgactcgaccgtggtgttccgccgtctgagccgcgcggacgtttcggctatcgcgcggcggatgctcgaggccaccgtgcagcgcgccgcggcgctcggcgtcacgctgacggtcgaggacgcggcggtcgagcgcattgcggacgagggcttcgacccgctctacggcgcgcggcccctgcgccgcgtgatccgcgccgaggtggaggacgccgtggccgagctgctgctcagcggaacgctccacgcgggcggcgccgcccgcagcgcggcggaggacggaacgctccgc

SEQ ID NO: 1143 - DNA, 366 bp, Unknown
  BMI gene
  misc_feature: SEQ ID N?2671057
atgaaaattctgaacagcggcgatatcttggaaaccatcgagatgctgaccgcagaaaaccttgatgtgcgtaccgttaccatgggcatcagcctgttggaatgcattgatcccgatggcaaaaaagcctgtgagaaaatctataacaaaatcacccgtctggcggggaacctggttcccgttgtcaacaagatcagcgcggactatggcattcccattgtcaacaagcgcatcagcgtaacgcccatcgccatgctgctgggcgctgcaccggacgccgaccccgtgtggtttgccaaaacgctggatgctgctgccaaggcgggcgggggcacgtttatcttccggcggggggtgggggggggg

SEQ ID NO: 1144 - DNA, 306 bp, Faecalibacterium prausnitzii
  misc_feature: SEQ ID N?2694475
atgacgcataacaattatatctatattgcggtcatggcgctggtatcttatgccatccgcattctgccgctgacgctgatccgtaagcctatcaaaaatcgctttatccagtcgtttttgtactatgtgccctatgtgacgctggccgtgatgactttccctgccatcattcaggcaacgcagagcccggcagcaggtgctgttgcattggtagttggcattgccgccgcatggtttggcgcaagtctgtttcaggtggctgcgggctgctgtgccgtggtgttcgtgctggaattttttatctga

SEQ ID NO: 1145 - DNA, 120 bp, Faecalibacterium prausnitzii
  misc_feature: SEQ ID N?2711042
aaccgcatcaagctgatgctggctgtggcaaaggagcggctgaacgcccctgtggaagctcagccgcttacggcagagcagcttgccggcggcgctcctcaggtcggcgctaccgtgtaa

SEQ ID NO: 1146 - DNA, 519 bp, Atopobium rimae
  misc_feature: SEQ ID N?2715919
cagctggcggtgcttgcccgctacttccgtcgggcgcacttcctgcttctgggcgatccgaaccaggccatcttcgagggcacggacacgtgggacgagatgcgcgcggtgttcgaggagatgcgcggttctgtgtcgcagtgccgcctcatgacgagctaccgctccacgccggccatcaccgacctgttcgcgcggcttctgcccgcgggcgaggccatggaggttgcctcggtgcagcgcgaggcgccggctccggagattgtggtgtgcgagaacgccgacgactggaaggccgcgttggtggaagcagtgcgcgtcgcgtgcgacgccggcggcttaacggcggtgatcgtcccctggaagaacgacgccaaacgcctcgcaaagacgctggacggcgtcaccgtgctcggcgagggcgacagcctgccggaaacggggatcgtcgtggtgccgctgaagctggcgaaggggctcgaggtcgaccgggtcctcatccccgacgcctcggcccga

SEQ ID NO: 1147 - DNA, 579 bp, Alistipes putredinis
  misc_feature: SEQ ID N?2716426
ctcttcggcgtgccgctgggaacttatatcagcggcgccgtgacatggcgtgccacgttcggcatcgtcgccgtatggggcgccgtggccatgctgctcgtgaaattatgggttccggccctgcctgcgctgcccgacacgggattgaaagggcagttccggtttctgaaaagcgctgctccgtggctggtgctggtgtcggtgatgctcggcaacgggggcattttctgctggtacagttatgtcagtccgctgatgattcacacttccggattccggcccgacgacctgacgctcatcatcatgcttgccggcttcggtatgttcgcgggcaacatcgtcggcggccactttgcagaccgctttacacccgagaaggttgtgcgcttcacgctcggcacggcctgtctggcactcgtcggcatcttcttcggggcgcatgtccgctacctctcgctggcgctgatgtgcctcacgacggcctgcctcttttgcgtgtcgtcaccccagcaattgctgatcctcgaaaattcgcgcggcggcgagatgctcggcgcggccctcgtgcaggtggctttc

SEQ ID NO: 1148 - DNA, 663 bp, Bacteroides pectinophilus
  misc_feature: SEQ ID N?2748603
atgaagaagttatatgcgctctgttatggagttatcttgttgtgtatcgtcggtacggcaatactccttatatttacgccggataccataccagtccactacaattttgctggtgaggttgaccgctttggaagcaagtacgaaaatctaatttggccgatatttacaatcagtatgggagcatttttcattctacttgcaaaacaaaaacgcaaaaaaggcgagactgtaaatgagaaaattcttctctataccgggatatgtaccctgcttttctttgctgcactcggtttctattttatgcttaaagctatcagatatgaccccgacgcagccgccacagtcagtatagatgcaatgaagtttactggtattgcaatcggtatattgctcgtcatacttggaaatatcatgcctaaaatgcggcgaaatgcgatgtttggtttgcggactaagtggagtatgacaaacgatagtgtatggcaaaaaagtcagcgtttcggagggattgcttcggtactgtgtggacttgcaatgatagttatttctgcttttgtgccaggtgtttggaatttgtttgtgatgactgttataattattgtttggttaatcctgtgcatgattgcgtcctatcgctactacaaggcagacaacaccccataa

SEQ ID NO: 1149 - DNA, 462 bp, Clostridium thermocellum
  misc_feature: SEQ ID N?2782815
atgtataaggcggcggtgaacttcctgcggggccaggtgctggtccatatcgaaagcggctgcccggagcgggtggtgaacctgtgcgccggggcggaggtgcccttctgggacgtacggtggctgtcgccggtggagctgaccctgcgcaccacccggcggggactggcgcaggtgcgccgggcggcggagcaggtgggggccgcggccacggtgcggcgggagcagggggcgcccctgctggcccggcggctgcggcggcgggatgtactgctggcggcggcgctgctgacggtgctgctggtggtggaggggaacttcaccatctgggaatttcaggtcagcggcaacgagacggtgccggacgaggccgtcttacgggcattggaggattacggcatcaccatcggcacccggagcctggacatcgaccagaaggacatgcgcaaccatgtgctgctg

SEQ ID NO: 1150 - DNA, 2028 bp, Ruminococcus torques
  misc_feature: SEQ ID N?2783253
tatgtgctgtcggcgcagcctgcaagcactacggcgagtgtttctgccagggaactgacgattaagaaccttgcggtcaaggataagcagtacgatggcaaaaactcagccgagatcgacagcacacctacacttgtgggcgtggtcgacggcgatgtacttgagcttgtgaacggcgttcccacctttgacagtgtgacggtcggcaataacatcccggtcagctttacggcgtttacgctctccggcgacagtgtgaccgtcggcaactacacgctcactcagccgaccggcattacggcgagcatcgtggaatattctgctgacggcagcgagtatgaggtaaattccaacgactggatcaataaagactttgttatcacggcaaaagcgggctacaagctcggcctgaccgatgcggaaaacggggattgggtagattcccttacggcatcggaggaaaccgataacggaaagctgaccttcttcgtgaagaacaccgaaaccggagctatttctgcaccggtgaccgagagctacaagatcgacaagaccgcgccgaccggtgaggttaagctgaacgaacgcacggcgttccagaagtttatcaacaagattaccttcggtctgttctttaaggacgatgtcaatgtcaagctgacggcagaggacgacgcctccggtgtgaagtctgtgctgtacttcaagtccgataaggtgcttactgacaatgaggttcgtgcaatcaccgattggacggataacagcgacttcgacattgaggcaaaggatatggataaattcattatctatgtccgcattgaagacaatgccggaaatgtcacctttatcggctcggacggtgcgacctttgataccgccgcacccgaaatcgtcggcatcgagaacggcaagacctattatgtgactaagaaggttgcaatcgacgacgaaaaccttgagtcggcaacgctgaacggcgagtccgttgaggagatattcctccttgtcggcgacacggaggtgacatatttcatccgtgcggtggataaggcaggtaatgtgacggagtatacggtctatatgaagccgctttcgtccgtcaccgatgctgtttccggtatcacggtcggcaatgtcaggtcgagcgatgcggagacgatatccgcagtcgaacggcagatactggatattgccgaggcatttgacgacggcgaatccaccgaggcggaatggaacaagctgaccgaggcggctgcaaagtgcaaggacctgaataaacgcatcacagaggttgcggatgagatctcccgtctgatcgacaccatgaacggctacgatatcgacaaagtgacgagtgctgacaaggcggacattgaaaaactgattgccgataccgacacgctactttccggcgacaacctgacggacgcggaaagagctgctcttgaagctctgaagggcacggcgcgtgcgctccttgaccgcattgcagcggcaaagggcgctgccgaggacgatgaaatcacttcggtcaaggatattacaaaggacaatgtaaagctccgggacaaagaacctcttgaaaaggcggaaaaggctttggagggcgctctgcgtgacttcggcggcaactataccgaaggagaaagcaagaaccttggagagaagcttgaagccgtgaaagcggcgctggctgccatcggcaacgccgaaaaggcggcggaggaaatcaacaagctgccctctgcggatgacgccaagctcagcgacaagagtgcgctcgaccgagtgaaggtgatcgttgacgggcttaccgagaacgagaaagctatgctcggcaaggatgctctgggcaaactcgatgcgctggctgagaagatcaaggcgcttgcggaggaagcaaattctccggggaccggcgatacagggaatccgactctgtggattgcattgctattcatcagcggcggttttgtgaccggcgctgcggctgcaagcaaaaagaagaaccgctccgtgaaataa

SEQ ID NO: 1151 - DNA, 324 bp, Unknown
  BMI gene
  misc_feature: SEQ ID N?2792520
atgaatatagatattacacaggtcattgttgttttcgttacgctgctttcggcggtgatgaccggcattttgtttccactgattcgctccaaggtgagtgccgctcgctgggagttgatgaaggagtttgctgttgcaggggtgcaggcagcggaaattctattgggagccgggaacggaaagaaaaaatttgaacaagccaagcggtatatcgagcagcaatgcaaagagcatggaatcaaaatcaatgcggatgccattcaggttgccatcgaaaatgcgtggaagtcactgggactggatgaaaagcatcctgaaaaatag

SEQ ID NO: 1152 - DNA, 576 bp, Eubacterium siraeum
  misc_feature: SEQ ID N?2814936
gaaagtgacacacagagccttgtgttaaatccatttgaaacatcggagaacctaaacagcgaaacacaagtgagcaacccgtttgacacaacagcttccgtaacaaatatctccgtagattcagcggttatagaaacattgcctccgtttagtaaacctcaggaatccgaaccggaaaatgatgatttcagcaaatatcaggaagccgaaattgcattcagcgactacagcattgaaggcaagtcaactgtaaagtacagcggcggtgaggtaaatttcagctttgtgtccgattctgcaaagaataaatatgatgtagagattggctatatggcatttataaacggtgtgcctcaaaagctgtcgctgaacggctctgaaaaatccgagcttgtaagcatttcacaaaagcccgacacaaagcagacggttactcttacccttgtatttcaggagaaagaagtcgtagtgccgcggggcgtccatgccgcccggcagatcggcgaaatagatgtgccccgggcagtgcatctcgcccacgaggtggatgacgtacttgagattgacgttgaccgt

SEQ ID NO: 1153 - DNA, 1128 bp, Anoxybacillus flavithermus
  misc_feature: SEQ ID N?2817698
gtgatctggggtgaaaatctgcaggaaaaagctgtcgatcagtggacgcgggagatcccggtcgtcgccgaacgcggcaagatcgtcgatcggaacggcatcgtactggccgataacgacgatacgtacagcatcttcgtccgcaagcgcgcggtcagcagcatcgaagaggtttccaggggattgagcgaagcgctggatctcccttacgagtccgtttaccaacgcctctccgaaagcaaatcttcggaggtaaccgtcaagaagcaggtcgggaaagacgcgctgaacaaattgctggaatacgggtttgagggcgtctactacgcgcgcgacaattcgcgcgtctatccttacggcgaatttctgacgcaggttctcgggtttacttctgcggacggacaaggtcagtctgggctggagctctattacaacaaatacctgcaggggatcaacggcgaaattctgtacgagacggatatcgtcggggtggagatcgagggaagcacgcccacttatattccggcgacggacgggctgaacgcaaagctgaccatcgactacgaggtacagcaggcagcggaagccgccatggaacgggcatatcagacgcattctccgaaatctgcgcgggcgatcgtcatgaatccgcagacgggcgaaattctcgcgatggcgaacaagccctctttcgatctgaatgagattccgcgcgacgatctggacgcattgcatgcgttgagccggaacggtttgatttcggatgtatacgagccggggtctaccttcaaagtcctgacggctgccgcaaacatagaggaatatttacagggaaaccggaacgcattttcgccggaacacattttcagctccagccgataccgctatgtggacggacagcgcgtgaagtgctggagcgatcacgcgaacggcaaacattccaacgagacgctggcagacgcgctgaacaacagctgcaatccggtattcgtggatattgcgctcgcgctcggcaaggaaaaaatgtacgaatacatagaaaaattcaattacggcagcgtgaccggcgtggacttttcgggagaagcgcagggcatggtgctgcccgcttccgcgatccagaacgtc

SEQ ID NO: 1154 - DNA, 717 bp, Clostridium bolteae
  misc_feature: SEQ ID N?2818142
atggaagctatggacgagaaattaaagagaatcagggaactggtagtgctgctaaatgaggcaggcaaagcctattatcaggaaagccgtgagattatgagcaatcttgagtatgacagattgtatgatgaactggcagaactcgagaaagaaaccggaatggtgtattccgacagcccgaccgtgaatgtcggttatcaggtgttaagtgaactgccgaaggaaaatcatgaagcaccgatgttatcactggacaagacaaaatctgtggagggactggcagatttcctcggggataaagagggactgctgtcgtggaaactggatggactgaccgttgtactgacttaccgggacggtgttttgcagaaagcggttacacgcggaaacggactgaccggagaagttattaccaataatgcgagggtatttaagaatcttccggttcggattccgtttcagggagaactgctgttaagaggggaagcggtgattcattattcagattttgaacggctcaatgcgaccatagaggatgtggatgcaaaatacaagaatccgagaaatctctgcagcggttcggtgcggcagctgaataatgaaattaccgccggacgtaatgtgaatttctatgcatttacactggtgcgtgcagagaatgaggattttcataattccatggaagcacagtatgatttccttgccggacagggcttt

SEQ ID NO: 1155 - DNA, 492 bp, Clostridium cellulolyticum
  misc_feature: SEQ ID N?2819291
atggcgggaatttacgtacacgtgcctttctgcaaggcgaaatgcacatactgcgacttcgcttcctacccgaaagaagcggggaaagcggacgcctatttcgcctgcctgtaccgcgaaatgaagggctggcgggaagaactcgcgggcaagtcgttcgatacggtttacttcgggggcggcacgcccacctttgtggctgcgccgctcatcgcgggcgcgatgaaacagctccggaactgttaccgcatcgccgaggacgccgagatcacgatcgagtgcaaccccgggacgctgacggcggaaaacgtttccgtctaccgcgccgcggggatcaaccgctattcgatcgggctgcagtcgggaatagacgaacagctgaggcggctcaaccgcgtacataccgccaaggactttctcctcgcgtgctccctgctgaaaggggagaatctgagcgcggatatcctgatcgggctggcggggcagaagcag

SEQ ID NO: 1156 - DNA, 1014 bp, Unknown
  BMI gene
  misc_feature: SEQ ID N?2820917
tatcggctgattgatttccctctctccaacatggtcaattcggggatcgatacgatcggcgtcatcaccaagagcaattaccagtcgctgatggatcatatcggttcgggaaaagactgggatcttgcgcgtaaaaacggcggtattattattttgccgccctttggggatacttccaatgatcgcctctatacttcgcgtctggaggcgctgaagggaatcatgggctttttgtggcgggcagacgaagaatatgtggtgatgaccgactgcgacaacgtctgcaggatcgactataatgccgtcattcgttcgcatgccgagcggaatgcggatatcacggtcgtctacagaaaacacgccgccgccgaatgttcggagaacaaggtgatcgcattcgacctggacggcgaggaccgcgtgacgaatatccgttatgaggagacgttcagcgagagcggcaatatgagcatgaacatgtttgtcatgaagaaggtcacattgcagaatctgttgctggacgcgatctctcacaatgcgaagcactttacggaagatattttggcgaaaaacctcaagcggctgaaaatctgtggataccggcatgacggttattacgtcgggatcacctcgctgcaggcgtattacgagcatacgctcgaattgttggatgaaacagtacggagcgacctgttcggggacagaagcgtgtttaccaaagtcagggattccgcgccgacgaaatacggcgcgggggcgatcgtaaagaattcgctgattgcggacggctgcatgatcgagggagaagtggagaattccgttctgttccgcggcgtaaagatcgcgcgcggcaccgtcgtaaagaattccatcctcatgcagaacacggtgacgggcgaaaatgtgacgctgaattgcattatcacagataaaaacgtggtgatccgcgataaacgcacgctttcgggcagtgaaaatcatccgttttatatttcaaaaggcaatatgatataa

SEQ ID NO: 1157 - DNA, 348 bp, Unknown
  BMI gene
  misc_feature: SEQ ID N?2827561
atgaatacgctggattttttgctgcagctcgccatcattttgctggcggctaaatttttggggcttttgatgaaaaagctcggccttcctcaggtgctcgggtttatcctggcgggggtgctgatcggcccttccatctggggcgcgatcttcgggaacgagaccttcgaggggtggcttttccccatacagaatacggcggacagcccgctcggcaccttcgccgagatcggcgtggtgctggtcatgttttccgccgggctggaaaccgacctgaaggaaatccgccgcacggggctgaaggcgtttctcattgccatgggaggcgttttgctgccgctggcgctg

SEQ ID NO: 1158 - DNA, 531 bp, Clostridium hylemonae
  misc_feature: SEQ ID N?2827837
acggtgagggaccttctctatggcgtcatgcttccctccggggcggaatgctgcctcacgctggcaagagggatcgcgggttcagaagaggcctatgcggagctgatgaaccagaaggccaaaaagatcggtatgagatccacccatttcgtgaactgcaccggtcttcataacgacgatcattattccacggcgaaagatatcgcaaagcttcttcggtatgccctaaaaaatgtggatttccgggcgatctttacgagtcagagccatgcaatgtccccgaccaatgtccatcccgacggctttacggtctacagtacgatgttccgggcgctgggagaccgtggctttaccggcggacagcttctgggcggaaagacgggaaataccttccgggcaggcctttgtctggccagtcttgcggaggtaaaaggaaaggaatacattctggtgacggccaaggcggaagacgccggggatgcccatgtgacggacgccctgaaggtctatggccagatcggagaacagtaa

SEQ ID NO: 1159 - DNA, 597 bp, Unknown
  BMI gene
  misc_feature: SEQ ID N?2829342
atgaaccatatctccatcacggacatccagggcatccgcttcggcaacgcccagaaccaacaggccatgaccggtgtcaccgtcgtcctgttcgaccgctccaacaccggcggcattgacatcagcggcggcggccccgcctctcgggagaccggcctgctctcgcccctgtccaaccccaattccctcaatgccctcgtcctctccggcggctctgccttcggcctggacgcctccaccggcgtcatgggctacctggaggagcatcacatgggctaccacgtcctcaacaccaccatccccctggtctgccagtcctgtatcttcgacctggggctaggcgacggcaccacccgccccgacgccgccatgggctacgccgcctgtgtggacgccgaggggaaccaccctcgttccggtatcgtaggtgctggcaccggcgcagcggtaggcaaggtctgcggcatcgggcagggggagaaatccggcatcggctatgccgccttggaggtcaacggcttgcaggtgggcgccgtggcggtggtcaacgccttcggcgacatcttcgaccaccaaaccggacaaaagctcgccggt

SEQ ID NO: 1160 - DNA, 114 bp, Unknown
  BMI gene
  misc_feature: SEQ ID N?2829949
atgatggctaaacagaaatacattccgctttttgacgatcagttggaggtcatttcgttcctaacagacgaacagcttggcggcgcagttcgtgctgcgatgcagtacatgcgc

SEQ ID NO: 1161 - DNA, 1158 bp, Unknown
  BMI gene
  misc_feature: SEQ ID N?2830322
aagggcggaacagagattgaaaattattatgccgctgatgttcaggaaaaatatggtgttactccaaaagcttttattgatatgaaaggtcttatgggagatacggcggataatattccgggtgtcagaagcataggcgagaaaacggcatcaaagctgattcaggaatatggaacaatagagaatatctatcagaatattgatagtgtaaaaccggcgagagtgcagaatgcattgattgcaggagaggaagatgcaaaactgagtaaaattctggcaacgatcaatgtgaattccccggttgaaccggatttggaacaatgcgatattgaacagatgtataatgaagaatcccgccagatgataagaaaacttggttttaagtcactgctgcacagattttccgaaacgacggaagaaaaagaaccggagttcgcaccactgaaatcggcagtaagaattacttcggcagagaaactttccggactggagaaaaagataatggatgggaacgagccggtcggatatgccatatatccgggaaatgaatttaccggggcaaaagtctgccttgcatccggacgggatgtatatctggttgagcagtcggaagaaatcggacaggaaggactccggcagcttttgtgccgtttcgtggaacaaggaaaaacggtctgcctgtttgatttaaagagcattttaaaacaggtgcctttgcagatgacggatcatctgatttatgactgcatggtctgtgcctatctgcttgatccgctgcaggatacttatggatatgattatctgttaaaccgttatttcgggatacagacagagtccggaacggaactggcgggaaagaagaacatggacggactggccatggaagagccggataacttagagcggattcttgcttctgaggctctcacggcagtgatggcaggcccggaactggagaaggaactaaaagagaaggcgatgtacgacctttaccggcagatagaatatccactcatttatgttctggatgacatggaaaaagccggggtaaagatagatgaacaggcattaaaacagtacagtgatgaacttgccgtaaaaattcatcagatagagcaggagatatatgcagagacaggagaagaatttaatatcaat

SEQ ID NO: 1162 - DNA, 882 bp, Clostridium nexile
  misc_feature: SEQ ID N?2835894
atgtctgccccgctgcatctttatctgcacgttccgttctgcgtccggcgctgcaccttctgcaaccaaaaaatctatcccgccacgccggagacctgtaaggcctatgcaaatgcactgctggctgagctggaagctaccgcaccggatttttccggcgacccggtgcagacggtctactggggcggcggcagccctacggcgctgtcgcaggacgattttgcacggatcatgcgccggatcagggagctgttctctctggctgcggataccgaggtcaccgtggaagcattgcccaaccgtgtggatgcctcgtggatggttgccttccagaacaccggggtcaaccggctggtgctggggctggctactgctcgcatcccggagctggaacgcattggcagcgcaaacaatatgcctagttccgagaccagcctgatccttccgcagctgttccatttgcccgggtatgaggcaacgctgctgtatgggattccggggcagacggcggcaaattttgccaccagcctgcggttcgcagtcaagtacaaggtgtctgccttgcggctggaccccttgaccctgccgaagggcgtggaagaaaccgtgtgcagggacgaggttccggcgatgctggactatgctgcccgccatctgaccgagaagggctaccatgagtatctgcccggacgctgggcaaaacccgggcaggaatgccgggacctgctggcgcgccaaagcacggaaaactacctgagttttggcccgggcactaccacccgggtagacggaggtctgtcccgcaccacagagaatattgccgtgtacaccctgcgcccgcaggagccggaactgctgtataagccggtgaccggggcataa

SEQ ID NO: 1163 - DNA, 774 bp, Unknown
  BMI gene
  misc_feature: SEQ ID N?2837148
atgaagagtgagaccatcttccccgcaccggtccacgcaaaaacgcagccgcgcacctgcaccggcgaacgctaccgccatgagctgaagtaccggatctcgtacggcgaaaaggcggtgctggagctgcggctcgcgccgcttttgcagcgggacgcccacgcagggccgggcgggtatctcatccggagcctttattttgacgactgctggaactccgcctatgccgaaaaggatgcgggcatcctggcccgcaaaaaataccgcatccgcatctacaacggcagcgatgccgtcatccggctggagcggaagaaaaaagtgggcagctggatctgcaaagaggaggccgccctcacccgtgcggagctggagaaacttctgagcggggactacggcttcctgctcgcttcgccgcagccgctctgccgggagttttacttcgagtgcgtctccaacctgctgcggccccgcgtggtcgtggactacgagcgggaaccgtgggtgcagaaggagggaacggtgcgcatcacctttgaccgggacgtccgggcggcggtgggcggctgggacctgttcgacccgcacctgcccactttgccggtgctggaccccggcaccctggtgatggaggtgaagtttacggaatttctgccccagaccctccgggagctgctgccgcccaaagcgcaggagtggacggccgtgtccaaatatgtgctctgctgcgacaaaacggcctactgccacggcagttccggctggcagggctga

SEQ ID NO: 1164 - DNA, 453 bp, Unknown
  BMI gene
  misc_feature: SEQ ID N?2838517
atgttaaagaaggatcgtcatgctaaaattctggaaattatccggcagaacgaaatcgatacgcagggagaactgacgcagaaactgaatgaaatcggcgtagaggttacgcaggctaccatttcccgcgatatccaggaattgcatctcatcaaaattgcgggcaaggtcaagaagtacaaatatgctttcatcgataaaagggagaatttcattccggataaaatcgtcaatttattcaaagaaattctcgtatccatcacgtgcgtcaacaatctgatcgtgatcaaaacgctttctgggaacgcgagcgcggcgggaatggtcgtagaccgcatgaatttttcggaaattctcggctgcgtggcgggcgacgatacgctgttgatcattaccaagagcaattcggatgcggaaatggtgatcaaagaatttaaagaactcatgaaataa

SEQ ID NO: 1165 - DNA, 981 bp, Clostridium thermocellum
  misc_feature: SEQ ID N?2838518
atgctgaagaaactcgtcatccgcaatatcgccctgatggattttgcggaagtggattttgaaaaagggctgaacgtgctgtcgggagagaccggcgcgggaaaatcggttatcatcgattctctcaatttcgttctcggcgcgaaggcggataagactttgatccgctacggcaaagaggcgtgttccgttcaggctgtttttgaagtccccgatatcgaggcgctgaaagaagtcctgcgttctttcgatattgaagacgacgagttgatcatcgcgcgaaaattcggcgcggacggccgcggggaaatcaaggtgaacggttttccctttacggcgggaatgctgaaaaaaataacgcagtatctcgtcgatattcacgggcagagcgatcatttttatttgctgaaagaatccaatcagctggaattgatcgacggatacgcgcaggattccgtcaccgcggtcaaggcaaagctgcgtgcggagtttgcccgtctgaaggagatccgggaagagctggaagccttgggaggcgacgaaagcgcgcgcgcgatgcgccttgatattttggactatcagatccgcgagatttcggaagcggaactcgtcgagggggaagaagagtccctcgcgcaggagagggaaaagctcgcgaatgcggagaaaatcctgcaatcgctttccgtcgcgcgggactgtctcagcggagagggcggcgtattggacgtcttgcagacggcttgccggaatgtcggggcgctttcccgctacggcgatgtatacgccgcgctgggcgatcgaatggaatctctgcaatatgaattggacgacgtcgagcgcgctttgggcgatgaaatcgacggcatggagtttgacgacggagcgttggagcgcgtcgaaagtcgcttggaattatggaagcaactcggcaagaaatacggcttcggctattccgagatcatgcggtttttcgagaat

SEQ ID NO: 1166 - DNA, 402 bp, Unknown
  BMI gene
  misc_feature: SEQ ID N?2838861
gtcgcttacggaaaagagcgggtcgcggcggagtgcggcatgggcgtgccgacgatggaagatatcgttgccgaacttttaaagccggggcgcgatatccgagacagcctgccgaagcccgttctgcgggacgatattatggatatcaaagacctgaaggcgggcatggagctgatcggaacggttcgcaacgtcattgacttcggcgcgttcgtcgatatcggggtgcatcaggacgggttggtgcatatttcggagatctcagatcgctatgttaagcatccttccgaggtcgtaaaggtcggccagatcgtaaaagtatgggttctcggcgtggacgtgaagaagaaccgcatatcgctgacgatgcgcaaaccggcggcaaaggtgaaaaacgcttga

SEQ ID NO: 1167 - DNA, 288 bp, Unknown
  BMI gene
  misc_feature: SEQ ID N?2841034
atgagaaagagcgttgcaatcatcgcactactgctgtttccggcgctgctgcgggcgcagtcggaccgatccgagaccggcgcggcgtcgtggcgggaaaagggcgtcgtgaccatccgcgaagtcccggtctggggccgccggccgatgaaaagcatcggcgtgcaggagacccggctcgactccctgatcctgaaagagaacatcgccctgtcgatcgccgacgtgctgaccttcaactcgccgatcttcgtcaaacagtacggccgggcgaccctctcgaccgta

SEQ ID NO: 1168 - DNA, 735 bp, Unknown
  BMI gene
  misc_feature: SEQ ID N?2847376
atgaacaatgcggaattgccgaacagaagtttctattcctttgaacacgcgctggacgcgcgcttccgcatctcctgcgagggcggcgccgcggcgaaaatccgctccgccgtctatatccacgaaagggattttccccttctgatgcactcccataatttctatgaaatcaacatcgttacggaaggcacggggacgcatttcatcgaatccaacagctttcccgcccagacgggagacgttttcgtcatccccccgaacatctcgcacggatacagcgaggacgcggaccgcagcctgaagatccttcacattctgctttcgcgcggctttatgctggaatacgatcagattctcaaggggatcgaagggtattccctcctcttcaacatcgagccgcagctgagaaagaacaacaatatcaagatctttgcaaacatcaacaacgcggagtttatctattacctgcacgagatcggcaagctcgtctccttctgcgaaggggatatgacggacggcgtcaacgagaccaacaagaacgtgaagatattaaatctgatctccgatctggcgatcgcgctcactttgaacaacgagatctccgccaaaaattcccccgtcaatctgcccgatcttctgcaagtgctctcctatatcgaagataattttgcggaaaccgtgacgctctccgatctctgccgcgtctccaatatgtcccgctcttccctgttaaag

SEQ ID NO: 1169 - DNA, 1167 bp, Unknown
  BMI gene
  misc_feature: SEQ ID N?2849498
atgatcacttatcgctggtcaactgcggcggatttcgaccggatcctggataccgcaaaccgcattttttcgctccgcgtcaatgaagacggtacggaggtttacgaccgctcctattttcgcacgcttcagccgaagctttacgggagcgccgaggtcatgccgccgcatctgctggcgtttgacggagaccgtctggtcgggcttgccgcattgcgtgtccacccggtccggatgttcgggcagacggtacaggtcggcggcgtcggcacggtcggcgtgatacaggaataccggagtcgcggcatcatgcgcgagctgatgacccgtctgaacgccgaaatggaagatcggggcgttacagtcggggaactggggggcaaacgctcccggtatgcgcatttcggctattcgaccggtggctacggcatggagctgaccttcagccgggatgactgcctgcccttcccggcgcttgatttcgcggtcgcggagctgtccggtgacgctgccccggaggaaatccggttgtttctgtcgctgtatgaccggacgccggttcatgccgcgcggacggaggcggatttccttccgactctgcgctccggaaagcgcagaccgtaccggatcctgcgggcaggaaaaacggtagggtatctgtgcgcggattccgggctggacgccgtcagtgagctggagctggaggatcccgctttcctgccgcacgctctgcacgcattcttcaatgaggtgggcagatcctccctgctgctctacggcattgcgccggcggagaccggaaagctggcgcttttgctgccgattgcgactgccgcaaagctgtccgggcgggagcgctaccgtatttttgactatcggggactgatcgaggcaggtctgcgcgcacgggcggagcattttccgctgcttcccggcaccgtccgctttgccgttgaaggatacgggacgctgaccgtaacggtggacgggacagtgcaggtgacacggacggaggagatcgccggaacggttctgaccggggaggaggcgacccgcctgctgctcggactgccgtctccctgcggaattcccggaaagccgctgtcccagccggcttcggcgtggttcccgctgccgttccacaaccgcccgtgcgaccggatctga

SEQ ID NO: 1170 - DNA, 210 bp, Unknown
  BMI gene
  misc_feature: SEQ ID N?2849500
atggaaaatgaaaccgtaaaagcattctgggaagcggtcagagccggaaaagaggttacattcacttacgccgcaatggagcgggaaacctaccgcatcattgcaacctgtgaaggtcagacgatcgtttggattaagggtagcaacaccatttccaccagcaattccttcttcggcttcatggttggaagaggcaccaacctggcaatc

SEQ ID NO: 1171 - DNA, 747 bp, Unknown
  BMI gene
  misc_feature: SEQ ID N?2849709
atgaagatcaagaaaaatccggaattgagcccaatgtacggatatactgcaggcactcagaaatctgaagaaaagtccctagatgattttggacctatgacaaagacaaaaagccttattttgattattatggcggcctgcctgttagttatggtcggtggttccctaacttttggatggggaatgatggatatggcggctatttatatctggatggcagtgctcatggcgatcacactcagaatgtctccgaatcaggcagtaaacgagtttattgcgggaatgaagacaatgctcatggcggccagtattgtgtgtgttgcgaaagctgtctcctcgattctcacagcgggaacgatcattgatacgattatttacggactgagctttattctgaaagcagttccgacgatccttcagggaccggcgatgtacatgatcaatatcgttataaatatttttattacatctggaagcggacaggccgcagtagtaattccgatcgttgcaccgctcgcggatatgatcggaattacaagacagactgctgtactggcattcaacttcggggatggtttctgcaactatattcttccgacatcatcagcactgatgggaattttaagtatgggaaatgtaccatatgatcggtggatgaaatttatgtggaaattattcctgatctggatggtggtgggatctgttctgatgatcattgcacagatgatccattttggaccgatgtaa

SEQ ID NO: 1172 - DNA, 153 bp, Unknown
  BMI gene
  misc_feature: SEQ ID N?2851283
atccagggacttcgaggaatgggcgaactgttgaattctttctgggtgaacatgaagatgagtacttggagtgttgtcggtctgatggaaaaaagaacggcctcggtttgctatttaagcaaggaaaacttcatctcaagtgttctttcgtaa

SEQ ID NO: 1173 - DNA, 813 bp, Roseburia inulinivorans
  misc_feature: SEQ ID N?2855097
gccgctaccatgcaggaagttgcagccacggtcgatcagattacgacaaacgcacaaacagtccttgcctccgcaaccgagatgcgggagaatgccggaaatggtgtaagcctcgcacttgacattaaaaaccgtgcaagtgaaatcagtgaaaaaactgctgccaatatggattctgccacgaaaatggtggcagaacgtaaagtcgttctgaaagaatccattgaaaacagccggaatgcagaaaagattgctgactttgtagatcagattctgaacatcacaaaccagaccaacctgcttgcactgaatgcttctatcgaagccgcaagagccggagatgccggacggggatttgccgtagttgcagaacagattcgtgtgcttgccgatgacagccgtgctgctgccacaaatatccaggcactcagtaatgtcgtaattgattccgtaaatacactcagtgacaatgcggatgaaatgcttaactttgtaagcactgatatcttaaatgatttcagcgaatttgtagatatcgctgcatgttacagccaggatgcagataaagtagaacatatcatgaaccgtttcaatgagaatgcacaggaactggaagaaaccatgtccaatattacggatggtatcgatggcattaatactgccgtggatgaaagtgccaaaggtgtggcagatgcttcggaaaacaccactacactggtaaatgcccttgcactgattaagacagaagcggatggaaaccagcatattgccgaactgttatccgacgaagtaaagaagtttaaacagatataa

SEQ ID NO: 1174 - DNA, 771 bp, Eubacterium hallii
  misc_feature: SEQ ID N?2859982
tatatgacggggcagatatcgccgtattatcttaagaatgtgcagaataacgtctttctgcattttctgaaggtgtcgggcgcggcggcgctttccggagaggccatcgccggatatcacagcgacgggaaatattaccttacgaaatcgaaaaaagagatagaatattacgaaaagcgcgcgcaggagcttttgtcgaatgcgaagccactcatggatatatacaggagcgaccgcgaaaacgagtttaacgcatttttgctcgccgacgctggcaaaccgggaaagcgcataagcatcttctcggctttgccgatgtatacaatgagcggcgagctgctctcggacatcttggacagacggaatgttccggacgatgaccgccggagaattttcgatcattggatgtcgcagcgccgcagagcggagcgcattcttgaaacggaaagcatcgaggatgagatttcagacgtcacgaaggaggaatttgaaagccgcccgatatctcttgatctctccggagcctttttcgaagcggatatttcctacagctacgaagattatctgagacattcggaggaaacggaggaatttgccgcatcacatccgaattatacattgaaaaaaacatcgtctcatgtttttcggaatctgcagatacatattcacgaaggacagtgggcgatggtttcaaaaggaaaggcacccgcgatacattttgtggttcagcatcccaagctgcgcggcgctatagaaagctttattcctccg

SEQ ID NO: 1175 - DNA, 258 bp, Heliobacterium modesticaldum
  misc_feature: SEQ ID N?2860802
atggctacacctgttgttgttgcatacggcagaaccccttgctgccgcgctcgtaagggcggactggccgacatgcatcccattgattacgctgctcaggctctgaagggcgttatcgcaaaggttccttacatccaggagcatcccgaggagatcggcgatgtcatcaccggctgcgcaatggctattaacgagctgaacctgaacgctggtcgtctgatcgttaaccgcgctgagctgcccgacgctgtccccgct

SEQ ID NO: 1176 - DNA, 612 bp, Unknown
  BMI gene
  misc_feature: SEQ ID N?2862330
aaaaagatgaaaaaactgttatgtgctttgctgtgcgccgtcgtgtttttttcgtccgcgtgcggcgagccgcagcgcaagtacgattatacggtgccggatcgggagatgaacgggatgtttgacgttgatttgctgcaggaaaaaacagtaaccgtggaaaaggtcgccgagacggacggggtcgagggatttctcctcgaagggatgccctatgccgatacgcgcgtcaatcgggcgtttttttgggtgggaaaaccgcagggaaccgcgccgtcgacaggctggcccgccgtgcttttgctgcacgggggcggcggcaacgcctttgccgactgggtgaagttctggaacgggtgcggctacgtcgcgctggcgctggacgtcggcgggcagatgtttgacgcatcgctgaatctcgtcccgaacagggaattctactgtgacgggagctggggctctgtcggctgcggaacggacgaagcggctttttccagatcctggacgtatatgaatatctgcaatgcgatcctcgcgcacaattatctgcgctcgctctcttacgtcgacagcggtaaaacggttgcgaccgggatcagctggggcggctat

SEQ ID NO: 1177 - DNA, 642 bp, Unknown
  BMI gene
  misc_feature: SEQ ID N?2869555
agttattcagaaacaattcaatttaatggattccttgctttctatgctggctatgatgatgctaatccctgctttgttgtcccgaacgatgttacggccactagttctaccttcacaaatcctgatcatgctttctcttggtcttattcgtcttatacgtatgttagtagttcttctgtgactgctggaatactgacagctgaattccagggtgcttctcttcccatggtgaattctgttcgtatctggccttatacaagttcttcgctccatgcaacctctttcttgattgaaggaactctatcttctacaagcagctggtcgaccattcttcaggcagaaggaggtgtttactcatcgagtaagtggagacagtggaactctgtgtttgctgctggtcgtcataaactcattcgtatgacagcaaatcgagtgggagcatcttctatttatgtgaatgaactccaattccttgtttgcaatcgtcctgctcctactactattgagtatcctgaaacatcctattccttctacagtagatatgaagagtttaagattgaacctgagatttatggatactatggatgttcgattcagcctgccctccctgaaggagttactatgaatcctgatacttgtgtt

SEQ ID NO: 1178 - DNA, 648 bp, Eubacterium siraeum
  misc_feature: SEQ ID N?2872829
atgaattttttagtgatcggtttgggcaatttcggctccaagctcgcctgcgagctgaacgacaaggggcacgacgttctcgtcgtggacaagagcgaggaacgcgtcaacgcgttttcctccgtatttgagaacgcgtacatcggcgactgcatgaatcccgaagtcctcaagcacctcggcgtcaacaacttcgacgccgtgatcgtggcgatcgaggatttccaggcttctctggagatcaccgcgctggtcaaggagctgggggcggtgcgcgtcgtttccaaggcgcacaaggatatccaggcgaaattcctcatgcgcaacggggcggacgaggtggtctatcccgaccgcgacacggcgcataagctggcggcgcggctgagtgcgaaaaatctcttcgactacatcgaagtatccgccgaatatgcgatcgcggagatcgcgcttcccaaggaatgggaggggaagagccttttggagctggatgtgcgcaagcggtgcgacgtcaacgtgctggcggtcaggcgtgcgggttccgtcggcccgatgatgccggaaagccggttcgagacgggagacagggtgttcctgctcggcaagcagaacgtgatcggaaaactcgtcggcagggcgggcaaataa

SEQ ID NO: 1179 - DNA, 579 bp, Unknown
  BMI gene
  misc_feature: SEQ ID N?2873094
atggaaaacaaaaaagcgccgttttggtttgaaacggtaaaacaggatgggaaatcgggcgcccgcgccgggattctgcatacgccgcacggggacatcgagacgcccgtctatatgcccgtgggcacgcaggcgacggtcaaaggcgtcatgccgcgcgatctcaaagaggcgggagcgcagatcattctcgccaacacctatcatctgtatatgcggccgggcgacgagctcgtcagggcggccggcggattgcatcggttcatggcgtgggaccgcccgattctcacggacagcggcggattccaggtcttttcgctcgcccagctgaataaaataaaggacgaaggcgtctattttaattcgcatgtggacgggagcctgcatttcatcacgcccgagaaggcgatctccatagagaacaatctgggtgcggatatcatcatggccttcgaccagtgctcggagtacggaacggattacaaaaacagcaggatcgccatggagcgcaccttaaagtggctggaacggtgcgtgaaaacgcacaataatcccgcacaggcgctctttcccatcgtg

SEQ ID NO: 1180 - DNA, 636 bp, Bacteroides capillosus
  misc_feature: SEQ ID N?2875346
caggctgcccgggaggcagtggagctggtcaccaatgagcacacgaagatcattgatgcctccaccgctcacagaatcgctcccggctgggtctacggctttccggaactgctggccggacagcgccagcgggtcaaattcgccagacgggtagccaaccctggctgccatgccacaggctttctgtccagcgccgcacctctggcagcgatggggatgctgccgaaggatgcccctgtgagctgctactcccttaccgggtattccggaggcggcaagaagatgattgcccagtatgagggggacaagacggaggacctgttcagccccagaacatattccctgggcctagatcacaagcacctgcctgagatgataaagtatgcgggactgaagcatcccccggtgttctgcccggtggtggacgactactacaaggggatggagacagtggtgatgctggaaaaccgctttttgaagggcacgcccacagcggaggatgtctgcgaaatgctggctgcttactatgaaggggagacgctggtacaggtggccccctttggccggcatccggcccagatggcggccaacgccatggcagggcgggacgatctgcggctgtatgtgtgcggcaac

SEQ ID NO: 1181 - DNA, 585 bp, Unknown
  BMI gene
  misc_feature: SEQ ID N?2876416
gggaatacgacggaaaagcgcggatatatgaaaaagcagtctgccaccagctgtctcgtgatcaacaaaaaatccgaaaatgcggaagtgatcctcgaatatctcgattggctggcggaagacgaagcgaattacaacctcgcgaaatacggggtggaaaacgaacactgggtggatgcgggcgaaggccgctacacgtatcccgattccaaaaaggaccgttacgaaaccaatccgccctattccggcatgtacgcgcttttgaaatgggagctctattcctataagctgtacgataactataccgaggaagaatatggctggatcgatttggtccgcaatgcggagaccttcagcaacgcgtgcgagaacatgctctttatcggggaaacgacggatatggcgctgaatcaccagaccgcggaaaacgatttttttcaggactgcctggtgaaagcgtgggaaggtacgatcgatccggcaatcagtttttggagcagcgttgaaaaatacagaacgaccgccgcagaatatatcgaatggctgacgatgcagtattcgctctatgtcgcggcgagaagttaa

SEQ ID NO: 1182 - DNA, 360 bp, Clostridium scindens
  misc_feature: SEQ ID N?2884263
atggatgatacctttacattatacgatctcaaggtggaagtagtcgccggtgaccgcccgatggtgtgcagccacaaggtgggggactatttcctggtacagggagaaaacctggtgtttccgaaggaaacatcgttttccatgtattccctgagcgccatcctgccgcttcttccggcaaaagaacggccattggacccgaacgactggatgctctccgacgcggagatcgcctgcccggatccgaactgcggggcgagatttaagatcacaagagtcggaaagcggatccagagtcatgggcagtgcacggtcgtgccgctcatgagaccggatgcgggaaaatatcatgagaattag

SEQ ID NO: 1183 - DNA, 363 bp, Ruminococcus lactaris
  misc_feature: SEQ ID N?2884377
atgcgtaacctgctgcgggcaaacttctcccgcctctggaagagcaaggcgctgtggctctgcgccgccggagccttcgctttctccgccgccttcctgcaggggctccgggcagacccggagggcggcaccaccctggacgaggccttcggccaggtcttccccttcctccccctgctgtacgccgccttcctgagtcttttcctgggggtagagtaccaggacgggaccctgcgcaacaagatcatcgccggccacgcccgctggaaggtctacgccgcgtcgctgctctccggcgctgccggctgctgggtggtcctgctgggctggctgctgagcatccccatcggggtgctgaaattc

SEQ ID NO: 1184 - DNA, 1068 bp, Clostridium botulinum
  misc_feature: SEQ ID N?2887016
gtacccgtcgtcttcgccggggacatggtaaaaaaaggacagctggtcgcggaagcctccggcgcgctctccgcaaacgtatttgcaagcgtttccggccaggtcgtcggcgtggaagaactggtcaaccccttcggcgtcagacagaaatacgtgcgcattaaaaacgactttaaggacgaagcggtcacgctccccgacatgaaggacttttccccgcagtccatcgtcgggcgaatccgggaagcgggcatcgtgggattaggcggcgcgggattccccaccgccgtcaagctgtccccgcagaaccggctggatacgctcatcgtcaacgcggcggaatgcgagccctatctgaactgcgatttccgcctgatgctggaaaagacggacggcatcgtcaaggggatccgctacgtcgcccaggcgctgggcatcagacagattctgatcggcatcgaggcgaacaagccggaggcgatcgagcggtttgaaggcgtcggcggcatgacggtcgtgcggctcaaaaagcaatatccgatgggctccgaaaagcacctcgtctattgctgtacggggcggaaaatcgcgcccggaaagatgcccttcgacgtaggctgtctggtgcagaacgtcaagacactgctcgcggcatacgaggcgatcgacctcaatctcccgctgacagaaatcgtgatgaccgtatccggaaaagggatccggttcccgaagaacgtgcgcgtgccgatcggaacctcgttcgaggatatcgcggcgttctgcggcggcgagaccgaccgccccgtcaaatacgtcgccggcgggccgatgatggggaaagcgctctacaatctcaggcagtacgcgaaaaagacggattccggcctgctctttctgactgagggagagacctccctggaagcgccgtccaactgcatcaactgcggcagatgcgccaaaaactgccccatgcggctgatgcccatgtacatcgaattttataccctcgcgggagactatgaagcggggaaaaaatacggggcgctcagctgcatcgagtgcggcagc

SEQ ID NO: 1185 - DNA, 282 bp, Unknown
  BMI gene
  misc_feature: SEQ ID N?2888058
atggtctccctgctgggcagaccggtgctggagcatatcttattgctgctgcgccgccaccaggtcaccgaggcggctgtgaccctccactaccgcccggaggccatcaccggctacttcggcgacggcagcgcctgggggatgcgcctgcactacttctacgaggacacccctttgggcaccgcaggcggggtgagagcttgtcgggactttttggggcaggaggattttttggtcatcagcggcgactgcgtctccgacttcgatttgaccgactgctat

SEQ ID NO: 1186 - DNA, 324 bp, Unknown
  BMI gene
  misc_feature: SEQ ID N?2891219
atggggaagagtacagagcagagaatatgggacagggtaaaaatagcacagttgatacttttggctgccgcgtttttattatttctgggaggctgcggcagggaaggggcgccggcggatgcggcagcccggacaggcgcaacaatccagacgggcacagcaacccggacggaagcagcaacccagacaggcacagcaacccggacggaaacaacagccccaaagccaggtctgcagaatgcagatacgctggtctttctttcaggaggcgtggatattgaaaacttcggcagtgctgcatggacgggaggcagcgtaaaatag

SEQ ID NO: 1187 - DNA, 2055 bp, Eubacterium siraeum
  misc_feature: SEQ ID N?2891767
atggaaaaattcagctatcgctgcggcgccgttacgctgcagttcggagtgagcgaagagggctgtccctgtctgctgtatgccgggacgcacccggccgcccgcagggaggaggaagcgctcggcagatacgccgcagaagttcagctcagcggggaaaatcacggggagcatcacttttccaagcattaccgcagcagcgaaacgccttcgctccggtacgcggggcaccgcgttcaggcgcatgcggacggagaagaactgattgttacctcccggaattcgcggatcacggcagagtcgcactaccgctttttccggggcgcggagggattccgcgcttataccgtcgtcgtcaacagcgggaattctcccgttattctggattacgtatccgcgttttcctatgtgggaatcgacgccccgcaggcagggaactggcaggaagacgcattcgtctggattccgcataacacttggaaagcggaatgcagctggcagcgatatcccgtaaaggatctgggactgttttgctgcgctcctttttccgcaaagcgcattgcgctgaccgatacgggaacctggtccaccaaggagtatctccctgcggggatcttcggacaggcgggaacgggagaactgctcttttgggaaatcgagggcacgctttcctgggagtgggaaatttccaccgtccattcccggctttatcttttggctggcggcgcgaatctgcaggagagcttctggcaaaagcccctcgctccgggggaaaactaccgcacgcccgaggtgttcgtcacgttcggcggcgatctggatgaactcttcgcgcgcgtgaccgactatcggagggcttcgcgcacgtacgacgaaagcgctttcggcctggcgcccgtcttcaacgactatatgaactgcctggataccgatccctccaccgagaaagaactgccgctgatagaatgcgcgcagcggctcggctgcaagtattatatgatcgacgcgggatggtatacggacggtttctggtgggacgataccggtgaatggcgcgccgcgcccacccgttttcggggagggcttgcgttcgtcctggaggaaatcaggcggcgcggcatgatccccggcctgtgggtggagatcgaggtgatgagcgaggcgctcccgtttgcaaatgctctgccggacggctggtttttcaggagaaacggcaggcgtgtgcgggacaacgggaggtatcttctcgacttttccgttcctgcggtcagagcgtttgcggacggcgtgatggaccgcctcatcggcgaatacggcgcggggtacattaaaatggatcataacgtcaacggcggcgtgggcacggaatccggcttttctcccggagaggggctggaaaatcattggcgcgcgttcaaccgctggattgccggcgtaatgacgcgccatccgcatgtgatcttcgagaactgcgcgagcggcggctgccgcatggagtacggacttctgcggaagtatcacctgcagtccacgagcgaccagacgcattacgccggctacgtctccattgccgccaactgcgtcactgcggtgacgcccgaacaggccggcgtatggacgtatcccgtggcagaggacgataccgaagcagtggtcttcaatatggtaaacgcgatcctgttgcacgtctaccagagcggcagagtggatctcctggatgagcgccgcttttcgctcgttcgggagggaatttcggtcaatcaggctctttcggaggtcatcttaaaggggcatgcgttttggccgctcgggcttgcccgcttcgacgatccctattccgcgttcggcatcgcgcgcggagacgagatgtatctgtgtttctggaacaaagacaatctgagcgacgccgtcgtccccctgcaaaagtacggggtgcgggcggtagagcaggtctatccgtctcagatagagacgaatatgcggttggaaggggataatctgctgatttttccccaccgcaaattttttgcgagattatttcgattaaaaaaataa

SEQ ID NO: 1188 - DNA, 384 bp, Unknown
  BMI gene
  misc_feature: SEQ ID N?2897923
acaatgtgcgtgcaccaccactctatgacaagcccaaaccagtattgggagccgatggtgcttgccaagtacacgtcgggctacgacaatgtaaaggccaatcctgacattgggcattggtcgctttgcgcaattgaccctgtcgaggggcttaaaactctgagggggaaatatgcttcgctgcattttaaagaccagaaggagtttggcgtgccgaagaaccagtgcgtcgtcctcggaaagggtgctttcgatatgaaggcgattttgtcggagcttgacagccaagggttcgacggtttcctgaccctcgaaaacgagaatatcgcgtctgatccgatgcccgtcataaaggcatgcgtcgagtatttgcgcaaaaactga

SEQ ID NO: 1189 - DNA, 579 bp, Eubacterium siraeum
  misc_feature: SEQ ID N?2898468
gtgaaaaaagtaattgcattgctgttgacgctgatcgtcggcgcgacctggtttgccggctgtacgccggatcccgaagcgcacgcgcacgaatggtccgaatggaccgtagcggcagaagcgtcctgcgaaaaagacggcaaaagagtccgcgaatgcgagggctgcggcagaaagcagtatcaggtcatcgagggcggccaccaatggggcgactgggcgacggtcaccccgcagacctgcccggaacccgggctgaagcagcgcacctgcacggtctgcggagagaaagaggatcaggttcttccggcgctcggcacccaccattatgagatgacggtctcctttgcgggcgactgcatttcgtcggccgagtatcggtacacctgcacgaagtgcggcgacagttatacggaaaagggaaactataacaccgcaaatcacttcggcgacacgtatgcctgcggcgcgcactgcgtgcagtgcgcaaaggcggggcaggatcacactgcggtcacctgcggcgtatccaatcactttaactgcgacgggctgaaccacaccgagtgcgcgattccc

SEQ ID NO: 1190 - DNA, 855 bp, Unknown
  BMI gene
  misc_feature: SEQ ID N?2898470
atgtgggttttatttgctttcggctcggcttttttcgcggggatcacggcgattctcgccaaatgcggcatccggcagacggattctgccgtcgcaacggcgctgcgcacggtcgtcgtcctcatcatgtccgtcttaatggtgctggtcgcggggtcgttcgatttcagcggcatcagcggaaagacctggctcttcctgattctgtccggcgtcgccacgggcgcttcctggctctgctatttcagagcgctccagcgcggggacatcaacaaagtggtgcccatcgacaagtccagcaccatactgaccattctgctggcgtttttgttctttcaggaaccgctcagctggatcaaatggatctgcgtggcagccatcgccgccggcacgtttctcatgattgaaaaaaaggaatcggacggcgcgccgcagacgaaatcctggctgatttacgcgctgctgtccgctcttttcgcctctctctcgggcattctcgggaaaatcggcatcgacggcgtcgaatccaatctcggcacggcgatccgcacggcggtggttctggtgatggcgtggatcgtcgtatttgcgggcggaaaggcaagggaaatccgtaaaacgccccgcaaagaactgctgttcatctgcctttccggaatcgcgacgggcgcctcctggctgtgttactataaggcgctgcagaccggcgtcgccagcacggtcattgccgtcgacaaactgagtatccttttcaccgtgctcttttcccgtatcgtattcaaagaaaagctctgcgcgcgttctctcgccgggctgattctcatcgtcgcagggacgctctgcatgttactctga

SEQ ID NO: 1191 - DNA, 222 bp, Unknown
  BMI gene
  misc_feature: SEQ ID N?2900944
atgaaatacgtccgtctcaaactgaccgaactgccgcggatcatgtattcccattcctgcattctgaagaacatggatcccagccaccgcaataacccctattttgaactgacgctcttcgaggagggaaaataccggctggatatgcccggcttttcctatctgggcggcggagaagaatacattttttccccggcggatgtgccctacagcatccgcaat

SEQ ID NO: 1192 - DNA, 915 bp, Unknown
  BMI gene
  misc_feature: SEQ ID N?2903523
ttcttctcccgccgctaccgggatgaaaagagcatcctctcggccatcgccgcgattatcattatcatcttcttcattccttacacggcctccggctttgccgcctgcggcaagctgttccacgccctattcggcgcaaattatatgacgacgatgatcatctccgcgatcgttatcgtcgcctacaccgcagcaggcggcttcctggccgcttcgatgacggacttcatccagagcatcatcatgacggtcgcgctgctgttcgtgctggtttttgcgacggtctccgccggtggcgtggacgccgtcatggaaaacgccaaggcgctgcccggctacctcagcctgacctccacctatgtggcagactccggcagcagccagtcctataacctgctgcatattatcacgaccgtctcctggggcctgggctattttggcatgccccacatcctgctgcggtttatggccatcgacgacgagaagaatttgaagctctcccgccgcgtcgcctccgtctgggtcaccatcgccatgggcatcgccgtctgcatcggcatcgtcggcaaggagctcagcaacaccggtgcgatcgcacagctctccggcaacaacacggagaccatcatcgtcaaagtcgccgatcttctctccaagcacggcatcctgcccgcgctgatggccggtctcgttctctccggcattctggccagcaccatgtccacggcggactcccagctgcttgccgcgtcctccagcgtatcagaaaacctgctgcgggagacgctgcatctgaacatctcagagaaaaagagcatgctggccgcccggatcaccgtggtcatcatcgccattctgggcgtcatcatcgcccggaatccggacagctccgtgttcggcatcgtctcctttgcc

SEQ ID NO: 1193 - DNA, 561 bp, Unknown
  BMI gene
  misc_feature: SEQ ID N?2907159
ctcctcccctccgccgccgtaccggaaagcgcctggacggaggtcacgattgtaaccgagccctttttgaccgtccccgaaaaagagcgctacgcagccgaagcgaaggagtatttcggcgcgcagacggtctctttcaccgactccgatcaccacgtccgcctggcagacgaaccggtcggcttttttatcgtcgccgtcctctgctgtatgggcgtcgtcaatgtcgcctatttatacgtgcactatctgaacgaaacgcggcgggaagcggcgatctgccggatttgcggcggcacgcggcaggcggtcgcatgcgcctacttcttctccgttttcctgctcggtgccgtttctctgacggcggcgcttcttttctatcgctttgccggcgcgccccttctcgcgctgttcaaaagttttctgacggttcccgccgttccgtccgccgcctatccgatcgttgcggcgggctatttgctcttaacctgcgcgatctttctcgccgcaacgctggccggactctcccgttcgcctttatcggaggaaaagaaatgctga

SEQ ID NO: 1194 - DNA, 279 bp, Bacteroides capillosus
  misc_feature: SEQ ID N?2907797
atggaagagaaacacctctgcgttgccgcttactgccgtgtcagcacagaacaggaagaacaggacagcagtatagagttgcaggaattgcgttacagacagatgatcgaagaaaacccaaattgggaaaatgcgggtgttttctccgaaagagccaccggactgaacctacaagagcgttccgctttccaagcgatgatacgtcaatgtagggaagaaaaaataaacctgatccttacaaagtctatcagccgctttggtcgcaacacgctggatata

SEQ ID NO: 1195 - DNA, 582 bp, Unknown
  BMI gene
  misc_feature: SEQ ID N?2910582
gtattcgtgctggaaaacgactttgcgccggcagggctggcggggattctggtcatggtgcagtatctggggggattcaagatttcctggctgaacctggtgatcaacgtgccgctcgccgcgctgtgcttttttttcgtcagccgctcgttcgccgtgcgctcgttcgtcttttcggtggtgttttcgggcgcgctgctgctggcggaatacgtggatttctatacgttcgagacgcaatacgaccgcattctcgcggtcatttccgccggattcatcaacggctttctgtacggctgcgccatccgcctgggcggctcgacggggggaaccgacctccttgcggcgctcattcaggcgcgctggaagtcctataatctggtatggatcatcttcgcgatcaacgcggtcgtggcgggtgcatcctttttcgtctacaacaatcagctggagcccgtgctgttcagcctgatttacagttatttcacctcccgcgtgagcgacaatattctgaagggcatcaaggcggctctgcgcgcggagatcgtcaccgaggatcccgagcccattgcccgcgcgctc

SEQ ID NO: 1196 - DNA, 222 bp, Unknown
  BMI gene
  misc_feature: SEQ ID N?2914751
atggggatcgacaagagaaaagcacagttggggaaatggcggattccggaacggaccctttttctcatcgcgattctgggcggctccccggggtccattgcgggcatgttcttttttcgccacaaaacacggcacgcgtctttccgctacggcctgccactgatcttcgttctggagctgatcgcggttctctttctataccgcctgagattcacggcataa

SEQ ID NO: 1197 - DNA, 600 bp, Anaerostipes caccae
  misc_feature: SEQ ID N?2916000
gaggtggcgcagggctacaaggacgtcagggaaaagtccgttttcgtgaaatttaaagccaaggggcgggaaaatacctatttcctcgcatggacgaccacgccctggacgctcccttcaaacgtctctctggcgatgaaccccagggaaaactacgccgagatcgaagcggaggacggcgcgcgctatattcttgcggaggcgctcgttcccgctctgttcgagcattacagcaccgtctccgtcaaaaagggaaaagaatacgagtatgcggaatacgagccgctctttccctttgccgccggaaaataccgggaaaagggctggtacgtcgtgaatgcggactacgtcacgctgacggacgggacgggcatcgtgcacaatgcgcccgcgttcggcgaggacgacgcgcaggtgggaaaagcctatggactgccgttcgtcaaatttgtggacgaccgcggccgcatgacggaggagacgggcgcctacgccggcctctttgtcaaggaggcggacggggcgatcatcagggatctgaccgagcagggcaagctcttcaaagtgatggagtttacgcacagctatcccttctgctgg

SEQ ID NO: 1198 - DNA, 867 bp, Roseburia inulinivorans
  misc_feature: SEQ ID N?2919636
atgttaaaaaccacaccggactctgttgatatccgtaccataccttccgtaatcggcggcagtgaaaaactccgccatgggattgtccttgcaaagtcttccccggcaaaaaaatataatatccaaacagcagaaacacttgtcagtgcaagaaaaaaatgtcccggacttgtgattattccgccggattatgaaatctatgtccgctattcttcccgttttattgatttactgcagcaatatgccccggtcatcgaacaatacagtatcgacgaggtattctgcgatatgacgggaacagaaaaactctatggaaatccggtagactttgcccaccgtttaaaaaacattataaaaaaagaactgggatttaccgtgaatatcggtgtttcagaaaataaacttctggcgaaaatggcatctgatttcgagaaaccagataaggtgcatacacttttcccatctgaaatcagggaaaagatgtggccgcttccggtaaatgaactgttttttgcagggaaatcatctgtcgcaaagctccattccctaggcatccacaccattggggagcttgcctcaacggatgtatccattctcagaagtgttttaaaaaagcagggagaagtattgtggaattatgccaacggccatgaccttgaactagttacagatcacaaggtccctgccaaaggatttgggaattccgtcacaaccgcttttgatgtcacggacgaatatgccgccggaaatatcctgctctccctgtgcgaaaccgtcggggcaaggatccgtgccgcaaaagcttatatcagtgttgtcactgttacgattgtcggaaatgatttctccagatacagccgtcagact

SEQ ID NO: 1199 - DNA, 342 bp, Clostridium phytofermentans
  misc_feature: SEQ ID N?2921137
atgaacctgcccaataagctgacgatattgcggatcgtcatgatccccgtctttatggcttttttcttcctgacgatgatcccgtacaactacttcattgcggcgatcgtctttgttctcgcggcggcgaccgactttctggacggctatatcgcccgcaaatatcatcttgtgaccaatctgggaaaatttctcgatccgatcgcggataaagttctggtatccacagcgctcatcctcatgctcacggtggatgcgatcctgccgccgctcttttccatcgcggtcgcggtgattctggcgcgggagctcatcgtcagcggcttccgcatggtggcggct

SEQ ID NO: 1200 - DNA, 207 bp, Unknown
  BMI gene
  misc_feature: SEQ ID N?2922371
acggtgctcacggtggagtacctgcgggccagaaacatcccggtgaagggcatcatcctgaaccactatcacccgggcgatgagatggaagaggacaaccgcctcatgtgcgagcggcgcgccggggtgccggtggtggcctgtgtggccgacggcgaccgggaactgaacatggacgggcaggccctggctgctttgtacgaataa

SEQ ID NO: 1201 - DNA, 753 bp, Unknown
  BMI gene
  misc_feature: SEQ ID N?2924258
atgaaaaaatttttcgccgtgctcatcgccttgttttttctcgcgccgccgctcgccggaatttcgcccgcgcacgccgccgagaccaaatacggcagggcgctgcactccgatatcggtttttataaggacaacgcggggagcgatctgctcttttttctcccctactcctattacgtgaaggtgttggtcgagggcgaaccgtattccctcgtcgaatgccacgacgcggacggagaaaccaccaagatcgtgggatacgtgctgaccgactccctctacttcgacggtacgctccccgtcaacccctacctcgaactcgccgtttccttaaagcgcgacgcctttttatatgccgaccggctctgcacggaaaagctgaccaagctcttttataacgacaaaaaccagaacaacgccctcttccgctattacggctacgcctacgacgccgcgggcgaaatggtctattacgtggaattcttctacgattacgggtatttaaaggcggaagacgtgttctccttccatatccccgatcatcccgatcccattccctcgttcgagccggaaacgcccgacccgccggacgacgacacgcagatcatcgagggaaaaggcggcatcggcggcgtggaaatcgccatcatctgctgcatcgttctggcgggcatcttcgtcgcagccttcctcttccgccccgccgccaaaaaaagaagagacgtttacttcgacgacggcgattacgactga

SEQ ID NO: 1202 - DNA, 363 bp, Unknown
  BMI gene
  misc_feature: SEQ ID N?2925517
atgcgcgccgaactctgcgcctgcgcgggggaacgggaggcgggtgccttgctgtccgccgcgcgcggcagctatgcggatgaaatcgcggaacgcctgaacgggcggggaatcgttcccgtcgcatgcgtttcgcccgcctatcccgcgcttctgaaggagacgggcgcgccgccgctcgtcctctatgcgcggggcgatctgtccctgctgtcttcccgctgttttgcggtggtcggcagcagaaagagcctcccatccgcccgggcgaaggcggcggaatttgcggaagccctgatcctgcacggcttcaccgtcgtgacggggatcgccgagggcgcagacagcgccgttttgcatgcg

SEQ ID NO: 1203 - DNA, 129 bp, Unknown
  BMI gene
  misc_feature: SEQ ID N?2926480
gacctgcggcgcagaccgctctaccggcggctgctgtcgctcggcgtgttcgagcgggtgctgacgatcgagcagaaggacgggaaacgaagctatcgaatggagaaaacggagggaacgacatgctga

SEQ ID NO: 1204 - DNA, 423 bp, Unknown
  BMI gene
  misc_feature: SEQ ID N?2929649
atgtttttgggcgtaaacgcaacatttgccgcagaatctaactcaacagaaaatgctgtacaaaacaaaacagcggttgaaaaacaaaaagtaaaacgctgcccttgtaagaaaatttttgaaaaaacgcttggcttaacaccggaacaaattaaacttgctgataaaaacagagccgatgagaaaaaagaaataaaagctgttaataaaaaaattaaaaagttgaaaagtaaaaagcaatcagaaaagaatatgaaaaaaatcgctgatttgaagcaaaaaaagttagaaatcaaagcaaaacataacgaaatttttgaatcttatctaactgatgaacaaaaagccaaacttcagcaaatgcgtgaagacaagaaaaacggaaaatcctgctgcccttgcggaagaaatccgtattactaa

SEQ ID NO: 1205 - DNA, 684 bp, Unknown
  BMI gene
  misc_feature: SEQ ID N?2929744
ccctatcccaataatcccacgggcgggatcatgacgcgcgcggccgtcgaggcgctgatccccgtcgttttaaaacacgacctgctgatcctggcggatgaaatttacgcggagctcacttacggcggaagtcacgtttccgccgcgtcctttcccgcgctgaaagaccgcgtcgtcctcgtcagcggcttttccaaggcgttcgccatgacgggctggcggatcggctatgtcgccgcgccgggggagatcttgcaggcgattctgaagattcatcagtacaccgtgatctgcgcgccgtcgttcagccagtatgccgcgctcgcggcgctgcgcgagggcagggaagacagtttcgcgggcgtttccgagatgcgggaagaatacgacaagcgccgtaaattcttatatcaatcctttctggcggcggggctgacggtgttcgaaccgaagggcgcgttctatattttcccttccgtgcgctccaccgggctgacgggggaagaattcgccgagcggctgctcctggaggagcgcgtcgcggtggttccgggcggggcgttcggcgcgagcggcgctgatcatatccgctgttcgtacgcggcgtccatgcagaacctcatcgcggcggcggatcgcatcgcggcattcgtgcgccgcgtggcgcgcgagcggcagaaataa

SEQ ID NO: 1206 - DNA, 531 bp, Unknown
  BMI gene
  misc_feature: SEQ ID N?2930117
atggcaacagtcattttgaaaaaaggcgagggccgtaccatcaaagccggcggagcctggatttacgataatgaaatcaatgaggtcaagggggattacgaaaacggagatctcgttcatgtagaagattttgacggatacccgatggggcagggcttcatcaacacccgctccaagatcaccgtccgcatgatgacacggcgcaaggataccgtcatcgatgatgctttccttgagatgcgcgtgcgcaatgcgtgggagtaccgcaagtccacagtcgacacctccagctgtcgtctgatttttggagaggcagatttccttccgggactcgtcgtggacaaattctccgacgttctcgttgtggaatctctcgcactcggtatcgaccgtctgaagctgacaatcctcgaccttctgaaaaagattctcgcggaggacggtatcacaatccgcggaatttacgagagaagcgacgcaaaagttcgtcttcaggagggaatggagcgtttcaagggatttatcggcgag

SEQ ID NO: 1207 - DNA, 771 bp, Dethiobacter alkaliphilus
  misc_feature: SEQ ID N?2931216
atgaaactcactgcagattatcatacccacaccgtgtacagccacggcaagggaaccatcatggagaatgccgtcgcggcggcggcgcaggatctcagggcgatcggcatcaccgatcacgggttttcgcatcccgcttacggggtgaaccccgaaaagctccccgagatgaaggcgctctgccgggaggcgtcggaacggacgggcgtcaccgtccttttgggcgttgaggcaaatttcatctccacggacgggaaagtggatcttccagagcggtattacgatgcgctcgatctctatctcgccggcgtgcacaagttcgtggggtacgacggcaggagcgtgttcaactttctcctccccaatctcttctatgcggggctgaaactgaagccgcccaagtccctcgtcgcgcgcacgacgcgcgcgtacatcagggcgatcgagaaaaacccgatcgacgtcatcacgcacgtcggattctgttgtttctgcgaccccgtggaggtggcgaagtgcgcgcgcgattacggcacctacatcgagctgaacgggaagaagccgcacttaagcgacgaagaactggcgcgggtagcggacacgggcgtctctttcgttttggattcggacgcgcatgcgcccggccgcgtgggggatgtttccatcgtatacgaacagttaaagcgcgttccggtgcccgaagagcgcatcgcgaacgtcggggggaggacgccctcgttccgatttgccgaatataaaaagaggagatag

SEQ ID NO: 1208 - DNA, 381 bp, Unknown
  BMI gene
  misc_feature: SEQ ID N?2934515
atgtctgaaaaagaattggaacattgcggctgcggccacgagggatgcgaacacgaggactgcgattgctgcggcgaagcggaagtagtggagcttctggacgacgccggcaggaaaatgtctttctatcacctggggacgatcgaatataaggacaagttttatgcggcgttccaggcggcggaggaagtcgagggattggatgaggacgagctcgtgatcttcgaggtggaagacgcgggagaagaggaatcttccctccttcccatcgaggacgaggctcttttggacgaggtttacgaggaattctgccgcgtgatggaggaagacgacctcgcggaagaggccatggaactcgagccggacggggaagaagaataa

SEQ ID NO: 1209 - DNA, 474 bp, Unknown
  BMI gene
  misc_feature: SEQ ID N?2936469
atgagttactcagctccagagctgtcaacacctcctgggaacttcactgtatccactgatatgtggtcacttggttgtgtgatctgggagctcttctcgctgggacaggaatccaatggaaccaccttcaaactggtccatgtagaagatggaaatccaacaacccacgcgacaattgtgcagaacctgcaacctgtgtcaatggatcgaattcctcaaatgctacagagtagtctaatgtccctactgaatgtaaatccaaatcagcgagcttcggccaatgcaatgaagaatgctccatacttcacacacggtcctgtacagacaatgcgagaattggatacactcctagaaatggacgaagagcatcagaaggaagtattgaaggatctgctacctgcattggctccatttcctgattatctccttgagagtatggtgttaccaaagttggaggaggtagatatgaattga

SEQ ID NO: 1210 - DNA, 1338 bp, Halothermothrix orenii
  misc_feature: SEQ ID N?2938639
atgaaatacgaatttccaaaaacatttctctggggcgcagcgacggcggctgcacagattgaaggtggagcctatgaagacggcagaggcccttcgatctgggatgcatttgctcatcttcccggcagaatcaagaacaatgatgtgccggatgtttcctgcaattcttatcatctctacgagaaagatattgagatgatgaagaaaatagggcttaaaacctaccgtttttctttttcctggtcccgtatcattccggatggaacaggagaagtcaatccggcaggaatcgagtactataagaagctgatcgctgccttgaaggcaaacggaattgtgccgaatgcgacgatgtaccactgggatcttccctatgctctgcagattcagggcggctttggcaaccgtgagtgcgtgaagtggtttacaaattatgcgaaggttctgctggataacttcggtgatgatgtggatctctgggcgactttcaacgagccgattgccgtttatgtgggaactgcttatggcttttttgccccgggtctgaagaatgaaaaatatgcccgccagtctctgcacaatctcctgctctgccatggagaggcggtgaaacttttccgtacctattcctttgcccatgcgaagataggtattgtggtggatatctggaaacattatccggcccgcccgggaaacaaagaggacgaggagagagccattttcaacaacgagatcgcaggctacggcatgttccttcatcccctgtttctgggaggctattctgatgagctgaatgcctaccttgaaaaaaatgatctggttcccaggatggaagagggcgattttgatgtgatgcatcagaagctggatttctacggactgaatttctacaacggactctatgacaatatggaggagatccgaaagagagaggagatactgaaggcaggtggaaactatcaggatcgtccggagcagcatccggaagcgctccgcgatgtgttgcatatggtggtggaaaaatatcatgtggatattccgatttacatcacagagaacggtcttccccaggaggacggcccgatggaggaggttctcaacgatcaggaaagaatcgattatgtaagacaggttctgattgcgcttcatggcgcgttggaggacggtatcaatgtcagaggctattatctgtggtctctcatggacaatttcgagtggtctgccggtttctcaccgcgctatggcctttgctacacgaactatgagacgggagagcgtatcccgaaaaagagcgccagctggtacagcgacgtgatcagcgagaacggtttcgactga

SEQ ID NO: 1211 - DNA, 759 bp, Unknown
  BMI gene
  misc_feature: SEQ ID N?2941644
atgaagaaatcgagaattgaaaaaatcaaggagctgatcgagaaaaacggaaaggtcagctacgacgagctggccgccctgatgcccaattactcggagatgaccttgcgcagagatctctgcgcactggaaaacgaggggctcatcatccgcgtccgcgggggcgcggtttccttaaacgaactctccaaaaagacggaagaacagttttccgcgcgggtggggttcaacatcggggaaaagaaggagatcgcggcgaaggcgatcgagctcatcgacgcgaccaactccctgttcgtggacagcggctccaccactttgtacttcgcgaagcagctccccaacatcaactacttcatcgtgaccaacgggctcaacatcgcgaccgagcttttaaaaaagagcatgatgatggtgacggtgatcggcggggacgtttcgcggaacaatctggcgaccgtcggcaaggcgagcctcgactggctggaccgcatcaacatcgatacggcagtgatgacgactaccgcatataatgacagtacgggcttcacctgcggctcccagccggaggcggaaatcaaagccgcggtcatccggaaggcgaaacgcgtcatcatgctgttggacggctccaaagtggaccgcaccatgccctacacgtttgcctatccgagagagatcgacatcatcgtcgtggacgccaacttccccaaagagaagatcgccgcgttcaaggcggaaggcgtcgaggtggtctga

SEQ ID NO: 1212 - DNA, 1038 bp, Clostridium butyricum
  misc_feature: SEQ ID N?2943789
atggatatggaatcgaagatcgaacgactgttaaaagaactgactctggacgaaaaaatcggcatgattcatggaaaaggcctttttgagacaaagggcgtggagcggttggggattccgcctttaaaactttccgacggccccatgggtgtgcggaacgaattcccgggggacagctgggttccggtgggaaattccgatgattatgtctcctatctcccgtccaacagcgccctggcttccacctggaaccggaagcttgccggaaaatgcggccaggtcttgggagaggaggccagaggcaggggaaaagacgtgatcctggctccgggtatcaacatcaagagaagttccttatgcggcaggaatttcgagtatatgagcgaagatccgtatcttgccggggagatggcagttcctctcattgaaggcatccagaaagcggatgtggcggcctgcgtgaagcattttgccctgaataatcaggaaacggagcgcctctgggtggaggtggaggtaagcgatcaggccctccgggaaatttaccttccggctttcaaaaaggcggtgaaaaaagccggtgctttgtctctgatgggagcctataaccgttacaaaggagagcactgctgcgaaagcaaagaacttttgacggatatcctgcggaaagaatggggctacgacggaatggtggtctccgactggggagccgtccacgacacgaagaaagcggcggagagcgcgctggatctggagatgtccgtcacctatgattttgacaattactgtctggcgcggcctctcaaagaagcggtggaaaaaggcgagatctccgaggggctcattgatgagaaggtgaaaaatatcctccggctcatgaatcggctccatatgcttccgggagagcaccggcagagcggctcctacaatacgccggagcaccagaagactcttctcaaagcggcggaggagtccatcgttcttctgaaaaatgagaaccacatcctgcccctgaagccggagcggatcagaaagctt

SEQ ID NO: 1213 - DNA, 1275 bp, Unknown
  BMI gene
  misc_feature: SEQ ID N?2947471
ttgcagaaatacaaatatgtggcggtgaacctgcaaaagaagaagtttacgggttacttcatcgccgaaaacgagagccatctggcgcggcagctcgcggagcagaatctctatctcatctccgccaaaccggtatcggacggcacggtcaattccttttttacggtatccggcaggctgaagccgggggaactgaccaccttttcgcgccagttcgccatcatggtcaattcgggcgtttccatcctgaacacgctctccatcctgaaatcgcagtctttttcggggtatttccgccgcgttctcgaggtcgtatacgaggacgtcaagacgggcgtcatgctctccgaagcgatgaagaaacacaagcgcgtctttccggaattcttccgttccatggtctacgtcggcgaggtttcgggcgcgctggacaaagtgctgacctcccttgcggattactacgagacggatacggcgatcaagcgcaagagcaagggcgccatgatctatccgctcctgctgttgctgatgctggtcggcatcgtggtgctgatgatggtcttcgtcatccctaccttccgcaacgcgctcgacgatctggatatcgagatgcctgcgcttacgatggcgatctataatatcagcgactttttcctgcaatactggaaggagctcatcatcgcggtcgcggcgatcgccggcatcgtctggctgctgtccatgacgcagaagggaaagtatttcttcgacatgatgcgcatgaagacgccttttatcggcaaggtgaacgaaaacctcgtgacggcccgttttgcccgcgggttcgggcttctcctgagcagcgggctggacgtgctcgacgcgatggaggtcatctgcgtcgtgctggggaaccgctatgtggaaaaaaaattccgcgccgcgattgaggacgtgcgccagggaatgagcctgacgatggcgttcgagacgcaccgcctgttcccggatatcctcatccagatggtttcggtcggggagaagacgggcacggtggacgaggttctgctgcgctcctgctccttcttcgacgcgcaggtggaaacggcgctgagcgccctgactacggtgctgcagcccatcatgctcatcatcatgggcgtggtggtcgcggtgatgtttatcgccgtctattcgcccatcctctccattatgacggggctggacggaacgggcacggatattccggacgtggcttccgccgtcgtctcggcgttccggtctttggggaagtga

SEQ ID NO: 1214 - DNA, 522 bp, Geobacter bemidjiensis
  misc_feature: SEQ ID N?2947472
tggatcctgtgcgcgttcatgttctggcagcaggactggcgctttgccgtcgtcgcgatgatcgcctgctcggtatttgtctgcgtgtactatatcgacctcgagcacaaactgatcttcgatcggtttcacgtcatactgctcctgctaggggctgccgcctgcctgacggacgacggcgtttcgcccctcagccgcctgatcggcgcagtgggcggcggcgcggtgttcctgctcttcttctacgggagcatctggatcctgaaacgggaggggctgggcggcggagacgtcaagctcgtcgccgcgggggggttctttctgggctgggagaagctctttcttgcggtgctgatcgcttccgtgctgggaagcgtggtgcttttgatcgtcaacaggaaaaatcgggaagggagagagacggaatatcctttcggaccctttctcgtcgcgggcatgctgacggcgctgctgttcggcagtcagctgatcaactggtatttgggattattgggaggatag

SEQ ID NO: 1215 - DNA, 747 bp, Unknown
  BMI gene
  misc_feature: SEQ ID N?2948722
atgatccggatcaaaacggcggaagacctcgaacagatgcgggaagcctgcagaatgacgagggacgtgctgaacctgatggaagaaaggataaagccggggatgacgaccaaagagctggacggaatcgccttccgctttatcaagggcatgggcgccgaaccttcgtttttggggtattacggttatcccgcctccatctgcgcatccgtcgacgatatgatcattcacggcatcccttcggaggatatcgtgatcaaagaagggcagatcgtcagcatagacgtgggcgtatattacaacggatttcacggcgacgcggcgcgcacgtttcccgtgggggaagtttctcccgagaaacgaaagctggtcgacgtgacaagggaatgtttcttctgcgcggtgaacgcgctgggtgagggcgttccgctcggcgatatcggccatgcggtgcaggcgcacgcagaggagaacggattttcggtcgtgcgagagtacgtcggccatggcgtcggcagggacatgcacgaagaccccgccgttccgaacttcggaaagaggggcacgggcatccgtttaaggcgcggcatgacgatcgcgatcgaaccgatgatcaacatgggtacgcacaagataagacttctccccgacggatggggcgtcaagacgcaggacggaatgccgtccgcgcactacgaaaacaccgtcgcgatcacggaggacggcgtggaaattcttacgctgtaa

SEQ ID NO: 1216 - DNA, 537 bp, Unknown
  BMI gene
  misc_feature: SEQ ID N?2950758
atggcggcgagcgacgcgaaatggtatgtcattcacacgtactccggctacgaggcgatggtgaaggacagcctggaaaagttaatcgaaaataacaatctgcaggaaaacatcttcgatatccagatccccacggaggagacgctggaagagaaggcgaacggcaagaaaaaggtcgtcgagcggaagaaatttccctgttacgtttttctgaagatgatctattccaacaacatctggtatctggtcacgaatacccgcggcgtcacgggcttcgtcggtccgcaggggcgccctctgccgctgacggaagaggaagtcgtgcgcatggggctgatcaaggtcgcgacgacgatcgactttacggtgggagacgacgtgcaggtgatgaacggtccgctggaatcctttaccggaaaggtgaccgagctcaacgaggcgtcccagaaagtcaaggtggacgtcgtgatgttcgggcgggtgaccaacgtcgagctggatttcgttcaggtcaaaaaaattaccgtacagaattag

SEQ ID NO: 1217 - DNA, 429 bp, Unknown
  BMI gene
  misc_feature: SEQ ID N?2951031
atgatttcaactggatataatcagataaaatggggaattttaatcagtattatccatatttatatttctacggaactgggcggatttgaaatagttcccgcatttatcggatattttcttattatgcgcggtacttccgccatctgttcggaaacaaatctggaatatatgaacagcttaaaagcagaaagcctgcggctgtttattttgtcctgtgtttactggattaccggtatttttctcggatacgggcttgccatccagaagctgattctgattgtcttttatttatttgatgttctgtttttcggaaatcttttaaataaaacggtaaaatacttaaaagaatccatgcggctcgacgacgcggacaaactccgcaaaaaccgtatgacatttatcaaatgctatcttgcactgattattttt

SEQ ID NO: 1218 - DNA, 480 bp, Coprococcus eutactus
  misc_feature: SEQ ID N?2951248
atgaatgcaatgacttacgcagaacgcatgatagaagaactgagccgtggcacaagtgtaaccgatactttaaaagaacttgttgtgagtgggaatggaaaagtagatgggtttgagatggtggcggaagatttaatgacagattttattcagagtatccagattgcaccggatggcatggtaacggatatttatccggcggaaggaaatgaggcgggaaaaatcgatctgatacatgatgagaagcgcggacagattgcctgttatggaagagataacaaagtaaccgtcatgcagggacctttttctctgaatcagggcagaatgggcattgcagtgagaaatccggtttatttgaaaaatgaaaatggagaaaaagcattctggggatttacgattgtgattgtccgcgttccggagatttttaaaaactctgtacaggcactgacaggattcgactacgactactgtctgtcaaaa

SEQ ID NO: 1219 - DNA, 177 bp, Unknown
  BMI gene
  misc_feature: SEQ ID N?2954320
atggcagaatatggttttgaagcagaaaaagacttttgctcaaaaatgagcgaaagtacaggaggtagaccggttgcggattatgagatctccgtagacgtgatgagacatatttatcttataggaggaaccggcgcagttaggagaagccaaaattggattgagctcaaaaaataa

SEQ ID NO: 1220 - DNA, 558 bp, Roseburia inulinivorans
  misc_feature: SEQ ID N?2955125
gtaagatccattgcaagtacagatggagaagtggttggaaaattatacaataattcagctgcaactattttaggggaagagaacggatggtatcagatttcttccggaaatgtagttggatatgtaaaatcagaatatgtagtagttggtgatgaaaaccttgcaaagagtgttgcaacaagatatgcaaaggtaaatacagaaacattatttgtaagaagtgagccgacaacggaatcaaagattatctatatgcttccggaaggcgaagatctggtagcaattgatgaatctaatccgggttggattaaagtaactacagaggcaggcgatggttatatttctgctgattatgttgtaatgactacagattttgttacggcagagtctaccgcagaagaacaggcaagactgcagaaagaagcagaagagcgtaaggcagcagaagaagctgcagagaaagcaattgcggaagcaaataaggccaatgcaaagaaagaaacaactacaacagtaaaagagacaactacagcggctaaggaaacaaccactgaagcg

SEQ ID NO: 1221 - DNA, 666 bp, Unknown
  BMI gene
  misc_feature: SEQ ID N?2958543
atgaaaaagacgaaaattatctgcacgatcggccctgccagcgaatccgaagaagtgctcacgcagatggctctcgccggcatgaatgtggcgcgcctcaatttttcccacggtacgcacgaagaacacgccgaaaaaatcgcaaccatcaagcgtgtgcgcgaaaagctcaatctgcccatctccatcatgctggataccaagggcccggaataccgcatcaagaccttccgcaacggaagcgtaatgctgaaagacggcgatacgttctccttcaccgccgaagagatcgagggcgacgaacatcgcgtatccgtctcatacaagcctatgatccgcgaactggccgtcggagataaaattctcctcagcaacggacttctcattttcgaggtaacggaactcacggagacggacgcggtctgcaccgtactcgccggcggagagctcagcaaccgcaagagcatgagtttccccaacaaagtgctgaatcaggtctatctcagcgaacaggataaagaggatctgctgttcggcattgaacacgacgtggatttcgtcgcctgttcctttgtctccaaccgtcagaatctggaagacgtccgcacttttctcgccgggcacggaggcggaaacatcgacctcatcgcaaagatcgagaaccgc

SEQ ID NO: 1222 - DNA, 1257 bp, Anaerofustis stercorihominis
  misc_feature: SEQ ID N?2961294
atttctaccgaatataaattatatacatttgcgaggcgtattatgagtataaaaccaaaagaaaacagactttctccgcttttgaaatatcctggcggaaaagaaaaagaattaaaatatattttaccgaatcttccaaagaaaactgcgaattattttgaaccatttattggtggtggtgctgtctacttttctttagactgcaaacattactatatcaatgacaaatccagcgagttaatccatctatatgaaatgattgctgaacaaaatgaagattttttctctaaaatttgcggcattaataataattggatgaacatttccaatttaacgcaaaaacatgccaaaaaattacgggaaatttatgaattgtatcgaacaaaaaaaattgataagcaacagctttctgaccaaacaacagagtttttgtgtagccatgcaggagaattcaatgatctgttaaaaagtaactttaatatagcactggaaaattttattacagaactgattaaaagctatacaaataaagttattcgtatggcatccattgaagaaaaaaaaggaacactttgcgaagaagatattacgcaaaatattgaaggtgcctttaaaaatgctttttatatgcatttccgctacctttacaatcacattgaagaattgcatatttcaaagccttttgctaccgctatctatttcttcattcgtgaattttgttattcttccatgttccgatacaacaaaagcggaaaattcaatgttccttatggcggaatttcttataatcaaaaaaatttaagtaaaaaaattgcctatttttcgtctgcggaattagtggaacaattaaaaaatacttgtatttgtaatcaggactttgaagatttcttccttgcacacaaaccacacaaacaagattttatttttttggacccaccttatgataccgaatttagcacttacgccaacaatgcttttggaaaagcagaacaaaaacgtcttgccaattttctattaaaaaaatgcaaagcaaactttatgctaattattaaaaatacagattttattttatccctgtatgagccaggaacaaagtgtgccaatgggaatgtacttcaattgcataaatttgataaaaaatattttgtaagctttcaagatcgtaatgataaaaacgcacaacatctacttatcacaaactacaatattgatgataccaagggcaaaaagtcttttgctcctaacatcatatcgtaa

SEQ ID NO: 1223 - DNA, 261 bp, Clostridium leptum
  misc_feature: SEQ ID N?2962201
atgccgaatgaacaggatttgcaggttttgacgctggaagggcagaagcgcctcacgatgaccggcgtggagtcggtggacggcttttccgaacagtccctgaagctcacgctcgccggtaaacgcgtgctggtgacgggatcgcacatcaagatcacgtcgttcaataaagcgacgggaagcctgacggcggacggtatgttcgattccgtccgttacgacgccaaaaagggcagttttttcaagcgggtattcaaataa

SEQ ID NO: 1224 - DNA, 330 bp, Unknown
  BMI gene
  misc_feature: SEQ ID N?2962272
gcgaagatcgacggcgcgagcgcgttccgcaggtttatctccatcaatttcccgctctgcaaggcggttctcatttacgtcatcgtaaacgtatttctcgcctactggggcgattattacggtccgctgatgtacatgcacagctcgagcgcgccgaagacgtttgcgcttgtcctgtttgaaaaggcgatggatacggactccgcgatggacatggcgaacatccggatggcgggcggcgtgtttatgtccgtcttcccggcgctcctctttgcggtgtttcagaaacagctgatcgacggcgtcatgatcggcagcgtcaaaggttga

SEQ ID NO: 1225 - DNA, 609 bp, Thermoanaerobacter pseudethanolicus
  misc_feature: SEQ ID N?2963844
atgaaatttgcggatgtgatcgtcgacattgcggacagcgaagtcgataaaatttttgaatactcctttgaaggaatcgccgtacgggcgggctgccgcgtggtcgttcctttcggcaatcagaaaatcgagggttacgtcatagaagtgaaggattcttccgcttatcctgtcgagcgtatcaagccgatcttgtccgtgctggacgaactgccggcgatcacggaggaaggactttcgctgatgcggtttatgcagaagcgctactttgcgccggcagcctccgtcctccgcttgtttttgccggcagagatgcgccagggaaagatcagagaacagatttcgcgctattacgttttgaaagagggggattacgcgcagatggaagcgtcccttcgttcgactgcagtcaaacagagggcggcgctggcgtatctgaaggaaaacggacgtattcgcgcgccgctgttgaacgaaaaattcgggcgggaggctatcctcggactgtacgggaaaggtctcatcgaagtcctttccgaacgggagaacagatctccctaccgcgatatctcatcggaagataaacctgtgcgcctgacggcgcgtcag

SEQ ID NO: 1226 - DNA, 402 bp, Unknown
  BMI gene
  misc_feature: SEQ ID N?2964411
ccgaaggaggaacccgctgcggaaacgcccgccggcgaggaaaaggcagagcccgtagcggcggagaaggaagcggagaaagaggcggaggtagcgcctgcggcggaagcgcccgcggcggacgggaagaatgcggaacagcaggaaaccgaaaaacccgctgacgcgcccgccgacgccgaagaaaaaacggagaaaaattacgcggaagagaatatctaccacgtcacccgccgcaaagaggacggcaagtggcaggtaaaactgcaaaagggcgacaaggcgatcaagctcttcaacacgcaggaagaggcatacgcctacgcgaagaagatcgccgggaacaaagagggcaccgtccacttacataaagtttccggtcagatccgcaagtacaaataa

SEQ ID NO: 1227 - DNA, 270 bp, Unknown
  BMI gene
  misc_feature: SEQ ID N?2965526
atgatgatgacaggactcgcagcctgctctgccgataataacacggacagcaatgtaaacagtgtgaccgatgagagcggaaacagcagtaacagtgataacggcaaaaacacggataacagtctggaaaaagatatggatcatattggggatgacatcaaagacggtgtggaagatgtcggggacgatatcaaagacggtgtggatgatctgggcggaaatgagaaaaatgccacaggttcatcaaatacttccggcacggcaagataa

SEQ ID NO: 1228 - DNA, 804 bp, Moorella thermoacetica
  misc_feature: SEQ ID N?2965664
atgcgcagaaggttcaacaacatcgtcctgtttctcatggtggcggttctgaccgtcatcggattttccggaatgttccgatcggcgaaagcggaggcggagaggctgccgttcgcttcgggcggcgcggaatttgcgctcaggggaaaattttacacgtcttacggcggttcgacggaggagcgcaagcacaatatcgcgctcgcggcggcggcgatcgacggcacgctgatcgagccgggcgggcagttttccttcaacttcgtcgtgggagagcggaccgccgcgcggggatatctccccgcaaagatcattttcaacggtcaatttacggacggaatcggcggaggcgtgtgccaggtttcttccactgtctacaatgccgcgctgctcgccggcatgaagatttccgaatatcacccgcattccctccccgtctcctatgtggcgccctcgtttgacgcgatggtcaattcggcggggagcgatctgcggtttgaaaacgagacggcgctgcccgtatacatccgcgcggaagcggacggcgaacgcctcacgatctccgttttcggggaaaagacggaccggaggttcgtgcgcgagagcaggacggtggaagtgatccccgctccgcccgagatcgtcacggaggacgacaggggagaataccccgatctgcctgccggggagatcagagtgatctcttacagcaaagaggggctgaagagtatgggcattctctccgaatataagggagagcgcctggtatcccgcaaagtcatccgcaaagatacttatcagccg

SEQ ID NO: 1229 - DNA, 744 bp, Clostridium phytofermentans
  misc_feature: SEQ ID N?2965666
atgacccgccgggaaacagaggaaaccgcgctgcggcagtccgcgcgcgactacggctgtgcggcgggggattttctgcaaaaatctcccaaggttgtctgcgcgcccgtacctgagggggcgcggcggtatctggaaggcacggcgtttgcgatggcgtcttacggtcactgcgtggtggcgcggacggaagcaaacgtctgcggcgcgctcgcggcgtttttgcaggaacgcgaaccgcgggattgctttgtctttcccgccctcggcgcgctgactgaccttttgtcagagcacaagatcgccgtcctcgaatcgggcatgtactttttgcccgatcccggaaagatgaaggaaatcccctgtggattcccgctgaaagtgctttatccgcgtgattttgaagacctgtaccgggaggaatggcgcaatgcgctctgtgcggagcgcagggaactggatttgctcgcggtggccgcgtacgacggatcgcggctgatcggccttgcgggcgcttcccttgactgtgcggagatggcgcagatcggcgtggacgttctgcccgcctgccgcggccggggaatcgcgaaagcgctgacgagccgtctggcgcgggaagtgatggatatgggaaaagtgcccttctactgcgccgtatggccgaatatcccgtccgtccgcaacgcgctggcatgcggttttttgcccgcgtgggcggagatcaggggaaagaaaaaggagtga

SEQ ID NO: 1230 - DNA, 201 bp, Unknown
  BMI gene
  misc_feature: SEQ ID N?2966637
atgggaattccggtaaaactacaggcatttgaaggaccactggatttgctgcttcatctgattgaaaagaataaagtaaatatatatgatattccgattgtagagattacaagacagtatctcgaatatgtcaatcagatggacaggcaggatctggatgtggtaagtgaatttcttgtaatggcggcaaccctgattgat

SEQ ID NO: 1231 - DNA, 498 bp, Unknown
  BMI gene
  misc_feature: SEQ ID N?2969494
tacaagttgccgtattacacgctttctcccacctactcggtctgcaaaaagcacggctacattgcaggggaggtatacgagtgcccgcactgccacgaaaagacggaagtttacagccgcatcaccggttactaccgccccgtgccgcactggaacgacggcaaggcgcaggaattcaaggaacgcaaggtctatcacgtcgctggggcggcggaatacaacgctccctgctcgacggaaaacaccgcgatcgaccgcggcgcgaaaaaggcgggggataagctgctgctcttcaagaccagaacctgccccaactgcaaaatcgcggaaaagttcctgacggatgcggggatcgcatacgaagcggtctatgcggaagatcatcccgaactcgccaagcagtacggcatcatgcaggcgcccacgctgatttcggtagacggtgccgccgccgaaaagttcacgggcgtggcggcgatcaggcaatatctcgcataa

SEQ ID NO: 1232 - DNA, 663 bp, Eubacterium ventriosum
  misc_feature: SEQ ID N?2969688
aaaggaaaaaatatgaattatattgcaatgattgtggcaggaatcgtactggtttttgctgcataccgggggtatcgcgccggtattatccggatgatattatatgttgctgcacttgtaattacgattgtactgacaggatttttgttaaaaccggtaagccatctggtaaaggaaaacacatcgctttatacaaatattaaccagtcagtggcacaggtaatcagtgaacataatattgcagacatggagtcgctgaaagaacttccgtttccggaagcaatgatcgggcagattgagacaccggctgcagccatcgaagattttgaacagttcgtagcaaattcgcttacggatcagatatttaatgcgttaatctatgtatgccttaacattgtgctttatcttgcactgagaatcgtgctgggagcatttggtatagtagcaaggcttccggttatccgggaattaaaccatctggcgggattcctgctcggactggcagaaggactggtgtttttgtggctgatttgcctgttgttgcaggcttgcggcagcgagccgtgggcacagcaggtgtttgtccagattaatgataatagtctgttaagctggatttataaccacaatgtagtggcggactttctggcaaagctgatctga

SEQ ID NO: 1233 - DNA, 669 bp, Unknown
  BMI gene
  misc_feature: SEQ ID N?2971689
atctcgctcacgctctcctatattctggcgctctttttgaagagcgagatccccgggatccgcgtgatccgcgtgttgtgttatcttccctgtatcattccgggcatcgcggcgggatttatctggacggacgcgttcgccgcgaacgtctccgacctgtcgatgaacgggctgatcaatacctggatcatgaatctgggcggaaaaccgctgccctttttctctcagggggaaagttccctcccgacgctgctgttcaccgggctctgggggcttggcggcggcatgatcatgtggctggccgcgttcggcaacatttctcccgacctctacgaggcggcaaaaatcgacggcgcgggctacttcagcagtctgttccacatcactctgcccatgtctacgcctattttgttctacaacgcggtcacttccatgatcggagggctgcagattttcggcacctatgcgaactacggagcgggtgtggatgactccctgaatttcatcgtggtccgcatctatcggatcgcctttgattcggtctccgagccgggcggcacgcaggggctcgcctgcgcgatgtcgtggattttatttctgatcatcgggcttttgacgcttctgatgttcaagctgggcggatgggtgcagtacggggaggattcctga

SEQ ID NO: 1234 - DNA, 519 bp, Unknown
  BMI gene
  misc_feature: SEQ ID N?2972825
gacaaatggtttatttacaagattaaaaatctcgtagattttgagcagcggctcaaaggcgagcttctcacggaagatttgtatctggaagccaaggaaaaaggctttctggacgcagaaatcgcggttttcgcaaaaaaacggcttgctgatgtcaaaaagctccgtgaagaatccggaatcagcgcttctttcaaaatcgttgacacctgcgcagccgagtttgaggcaaaaacgccttattattactcgacttacaatgaatttgacgaaaacaaggtgaatcccgacgacaaatccattctaatcctcggttccggccctatccgcataggacaagggattgagtttgattattgctctgttcatgcagcctggagcgtcagagaaaacgggtataagtcgcttattgtaaactcaaaccccgaaacgctttccactgattttgacgttgcggacaagctttattttgagccgatgaacattgaaaatatcatgaatattataaaatccgaaaat

SEQ ID NO: 1235 - DNA, 2025 bp, Unknown
  BMI gene
  misc_feature: SEQ ID N?2973080
cgccataatatccggcgcggcgggctgttctatccgttcagccgtccggcggagcggctcgcggaatacgagcgcatccggcagaagctgatgtcccttgccgcgccccgccgcgagaccgccgccggcttcgcgcgcgcggtcagggaaacggcggagcggttcggcgcggaggagacgctgagagcctccgccctgcggctccgcgcggcaggcgaacgggaggaggccgctttcaccgaacaggcgtatgcaaaggcctcggcggtactggacgaaatcgcttcggtgatgggggaagcgcccatccgggcggaagaattcgaggaggtgctctcgagcggatttgccagtcaggaaatttccgtgatcccgcagtttttcgacgcagtttatctcgggaatttcaaggactgcaaattcaagaagacgaaatatctcttcgcgttcggcatgaacggagacgttccatttaccaagagcgacgccgcgattctgaacgattccgatctcggaaagctgcagtctttccgggtgatcgtagagccgaagatcaaagcggtaaacaggcgggagcgggaaaatacctgtctggcgctgctgtccttttccgaacggctctatctctcttaccgcctgaccgaccgcagcgggcggaacgtctcccggagcgagctcatcgactacattctccgcatctttgacggcctttccgtgatgacgaaggagggcgtcgcccgcgtctacgaggacggtacggaatccgtcaaagacgggctggacgccatgcgctttctggactgcgagcagggaaagcgcgttttcgcgcgggacgcggggcgcttccgcgaggggctcttatccgatttttcgggcgcttccaccttttacgcctgtatggcagagcggggggaaaaatctgcgctggacgaaattctggagcgcagcaattcggaactgcagattctgctcgggcgcggccggtccgttctgctccccgccgaaacggtgagcgcgaccgctctggagcgttactttacctgtccctaccgcaattttctggagggcgggctgaagatttccgagcgcaggagcggcgaggtcaagcccctcgacgcgggcaatttcctgcatgcggtgctggaacggtacgtggggcgcgtatccgcccttcacacgcgggaagagagcgacgcggaagtggagcgcatctgcgcggatctggaaaaggaggaagcgtacgccgttttcctggaagacgggaagggtacggtgcagctggaaaggctccgcgcggaagcgaagcgcgtggcgttcgccgtgcgcgggcagatcgtgcgttcggcattcggagaggtgcagacggaggtatccttcggaaaccgcccgagcggaacggagggggaaagaagctatccgcccctggtcttgaacgggagggaaaagacctattcgatgcgcggcaaggtggaccgcatcgaccgtgccggcgattatatccgcgtggtggattataagacggggcgcgtcagcaaagaggataaatacctgtatgcgggcagcaaactgcagctgtatctctatatgaacgcctttgtgggagaacacgccaagcccgccggcgtctattactttcccgttaccgaccgctatacggaggacggggaagagcctccctatcagctgcaggggcatacgctggacgagctgcacgtgttggagaagtccgacctctctttaagcgagggcagccagcggagcgagattttgggcatctccgttctgatcgacaaaaagacgggcgaagtcaaacccgggaaatcgcgctccctcatctccgagcgggcgttcggcgcctatctgaaatacgcccgcctgatcgcggagcaggggattgcggagctggaggcgggctccatcgtcccctcgccctttgaggacgcctgcgcggtctgcccgtacggcgggatctgcggcttcgaggccggcgtcaacggggaggcgagagaagtaaacaacgtcacg

SEQ ID NO: 1236 - DNA, 567 bp, Unknown
  BMI gene
  misc_feature: SEQ ID N?2973764
atgcgatttttgtggacagaccacctgacaccactgccggaacatcccctcgataccgatatcaccgcagacgtctgcgttgtcggcggcggcatcgcgggaatcctcatcgcccaagaacttgccgcgcgcggcgcggattgcgtcctgctcgacgcaactctgccgggagcaggcatcacaaaaggaacgaccgccgtcctcaccgcccaacatgaccagttgtattgtaaactcgccaaaacctacggcaggaacgccgccgcgaattacctgcacgccaaccttgaggggctggcgcatatccgccgcctcgcaaaagatatcgactgcgacctcgaaacccgcccgtcggtcatgtactcccgtaccggtcgggatgacctgaaacaggaagtcgacttcctgcattcggtcggcttccccgccgcctataccaccgccccgaacctccccttcgccgccgttgacgccgtcacctaccccgatatggcgcagttccacccgctcagattcctgcatgcagtcgcgcggagtctgcgctactattcccatgccttcgtccgg

SEQ ID NO: 1237 - DNA, 411 bp, Roseburia inulinivorans
  misc_feature: SEQ ID N?2975705
gcggcaaaagaagcttatgagaatttcgatgaaaaaacggaacggatgtatgaacttaaggattaccttattgaaaagctttctgccatagacggtgtgaagataaacagtgaaaatggaagggcaggtgcgccgcacatcgtgaatgtcagctttgtcggtgtcagaagtgaagttatgctgcatgaactcgaaagtcatcaggtctatgtttccgcaggatcggcatgttcatccaatcatccgcatatcagtgaaacacttgccggaatcggactgagtgcagaagagattgattcggcgatccggttcagcttcagtgatctgaccacaaaggaagagctggactatgcggctgacattatcgcagacagaatacagacgttgagaaaatttacaagaagaaagtaa

SEQ ID NO: 1238 - DNA, 510 bp, Anaerostipes caccae
  misc_feature: SEQ ID N?2975971
gatggaccaggactcgataaaagcgttatccaaaccccagcatataaaaaagtgttaaataaaatagaaacatatattccacaatcttcagtagttggaagacttttagaacatgaagaagaatatcaagttataaaaagcaatcaaaaaggattcatgcaacacgatattttttcttgggaaattgaaaatgataaattagtaagaatcgaaagagttacaacaaacagcgaaatcttcaacggcatattaagagactggcttaaaaacacaaccccagaagagcgaaaagaattcatagacatgctttaccaaatagtaacagccaccaaagcaacagaagtaagcgactttagaatagacacagtcaaaaaaattgctcaaatactaggtacatatagaagcagaaaaaaagaagaaaaaaaagaaatggaaaaaatgattaaactactaatttcaagcacaataaagataattaaggaatctaggaaaaatgaaaaagtaaaataa

SEQ ID NO: 1239 - DNA, 279 bp, Clostridium phytofermentans
  misc_feature: SEQ ID N?2976529
ggaatgatgccggtgatcggcattcagctgatcctcaatatgggcaatctcatcaaggatgacttcgaccagatctactccatggtcatgggggacaactactcgctccgtccggtcacggaagtattcagcagtctggtttaccgtcagctgcagggcggcgtagcgggattcagttcggcgaccgcagtcagtttcgttcagagcatcatatcgttgattctggtgctgggcgcaaacgcaatcgtcaaaaagacggacaatcagggattatggtga

SEQ ID NO: 1240 - DNA, 501 bp, Unknown
  BMI gene
  misc_feature: SEQ ID N?2979740
ggggggcgcggggggaggattaaaaaaacccgaaaacccgccaaccagattcccgtcgcggaagaggttcttcgctatgcgatgacgctttgttccgccacgcatccggacagcgactgcgcttctgccgccgcgaaaaagtacgtgcggctgggggcgagcccccgtgccggacaggctttgatttccgcggcaaaggtgcgggcgctgatgctggggcggtttaacgtctcgtacagcgatctcaacgttttggcgtatcccgttctccgtcaccgcatgaagctcacgtttgaagccattgccgagcgcatttcgccggatgagattatcatgatgatcatcaacgagctgaacggaaagaagtttactcccgtcaaggcgacgcccgccgaaaatcctgttcaggaagaagaaaaaacagagcaggcggcggaagaaaatgcgcagaatagtgcggaaggtaaaaaagcgaagcgcggtatcttcgggagaaaataa

SEQ ID NO: 1241 - DNA, 1905 bp, Unknown
  BMI gene
  misc_feature: SEQ ID N?2980214
ccggacatccgaaaagcggcggaggatatcctgctggcctttgccggggagcaaagcatcctctccggctacggtgacggccaactccatccgacagactctgccacccgcgcccagatggcgacgatgctgaccgtaatggttggtgcagtggatggccagaagaaggcagtcattaccccggcggatctctcggccttccaggacctggcaaacggctggtatacgccgtatgttgcggcggcagtgcagttgggcattttctacggcacctcggcgacggcattctcaccggacctgaagatcacccgggagcaggcatttaccgtcatcggccgggctttcggcctgcgggacggctctgccagtgactttgctggctatgaagacgcatcccgtgtcagcgcgtatgccgctggctgtgtcggtgcgctggtccgtgcgggctatgtgcagggcgatacgagaaatcgtctgaatccccaggcgaccatcacccgtgaagagctggcccaggtgctctataatctctttggcaaaaacggcaagatctgcacggcgccggatcagctgccggagaaggggaatgtgctctatgccagcagcgagcccattgcggatggcgcagtcattgacggcaatttggtcctgacctgcgccatgggagatctgacactccaggatgtcaagatcagcggcaatcttgtcgtcctctcaaaggatggcgcccgcatcacgctgcgcggctgcacgctgcagaatctggtggtgctctcccattcgattgtggattgcgataccgcagtgcagcaggcgtatctctcctgccaaaactcaatggtctacgctggcgatgccaaaacgcttaccatcggcggcagcagcacgatcctcggcaaatacgataccgtgacggtttccgccggcggtgtcacggcccagaaggggacggagatcggcagcctgacgctggacgcccgcaagggcagcttcgtcctggatggcacggcgaaggaggtcaccatcaatcccaaatatgtcaccctctccggcggcggctatgcagagcatatcctcgtccacggcaagggctacaccatcacctgcaaatatggcaagctggacgaagagctcgaccggggcctgaccggcacgaagctcaccctgagcagtggccagaccgtctcctccaccgcaccgacggcggcgatcacggcaacggtcacaggcgtcaacacgggttacggcgctgagagcaacgccaggtcctgcacgctgcgctggtatgtggacggcaatctgacccagtcccagagcatctccatccgagagggaacgacgagcacgttccgccatacttattatttctctcacagcatgcctacctcttcatcgatcaaggctgtcctaatctatgatgacgagcaagtcgagggtacgacgacggtcaagatcaacaaggccgtttccattccccaggtcaacggttccatcgcctccggggactacacccagtatcagaaagagacgttcgtcaacgccatgggctacagcagcaacacgagctacatggtctggattaacctgtaccggacaaaggtcaatgtattcaagggctcaaagggccactggtcgctgatcaagacctataactgcggcatcggcgcggccagcacacggacgccccccgggctgtacaaaatgcagacccatgagccctacgcccgttgggactacggcacctggtatgttgattccatcagccgctggaatggcgcgtacgcattccacagccgcatgaagagcacagctaccggcgcgtatgtcaccagtgacctgaacgtgatgatctcccacggctgcatccggatgaatacggaggaggcccgctggctgttcaatgta

SEQ ID NO: 1242 - DNA, 639 bp, Unknown
  BMI gene
  misc_feature: SEQ ID N?2981160
tttaacttcttcatcggcgttttaatggcgacgctggtaaagctggtactgaacttttttaacaagaaacaaattgtcaaaaagaaatataccaataatttcttgctgacgcggatcggcaatttcttcttcgacgtgatgatcgtcgccggaattgccgccattcagctggatgcgcttgcggattattggctggtcattctcattctcggcattgtcgggctgattataacgtatatttacaatctcatcgtcgcgcgggtgctgtttaaagattatgcggaagaacagtttctcgcgatgtacgggatgctcaccggaacggcgagcacggggatcatccttctgagggaatatgatcccgagttttcgacgcccgccgccgataatctcgtctatcagaattttccggcaatcgtattcgggtttccgatgatgctgctcgctacgtttgcgccgaaacagcctttctggacgatgattatcctgatcggtttctttatcgcgatgaacgtcattttattccgcaatcagatcttcggcggattacgggcgcgcagaaaggacgtcgcggatacgggagcggccgaagagaaatcagctgccggagagggaagtgacgaaacgtcggcggaataa

SEQ ID NO: 1243 - DNA, 702 bp, Unknown
  BMI gene
  misc_feature: SEQ ID N?2987047
ctcgcctgcggcgtggcggggctctcggtgatcgcagattcgctttccgccataaaatacgccaaagtgacgcccgtttataacgaggacgggatcatctgcgactttcagacggagggggatttccccaaatacggcaacgacgacgaccgcgtggattccatcgcggtggaggtgctgaagggcttttcggaggagctgaaaaagacgcccgcttaccgcggtgcggagcatacgctctccgtgctgaccatcacgtccaacgtcgtttacggcaagaagacgggcgccacgccggacggcagaaaggcgggcgagccctttgcgccgggcgcaaaccccatgcacaaccgggatacgagcggcgcgctcgcttccctcaattcagtggcgaagatcccctatgcctgctgccgggacggaatttccaatacgttttccatcgtaccttccgcgctcggagagacgccggaaacgcgggtggaaaacctcgcggagatgatggacggctatttttcgcagggggcgcaccatctgaacgtgaacgttctcgaccgcgaaaaattgcagaaagcgatggaccatcccgaactgtaccccaatatcaccatccgcgtttcgggatatgcggtcaatttccacaagctgagccgcgcgcatcagctggaagtcttaaagcgcacctaccatggaagcatgtaa

SEQ ID NO: 1244 - DNA, 960 bp, Alkaliphilus metalliredigens
  misc_feature: SEQ ID N?2992081
atgaacacctttcgccgtatcctgcctcttctgctttccgcgctgtgcctcgccgccatgtttctcttcgccgcgttctccgaccgctatctctccgtcgtggcggaagggatcgcgctgtgggcggcagtcgttctgccctccctgtttcccttcttctttctcaccgcactgctcacggggctgaacgccgtttccgggctcgccgcgcggatgacgcccgtcacgaaaaggctcttccgcacgcccgggcagaccgcgtacgcctttgcgatgagcgcggtttccggctaccccgtgggggcgaagatcctcgccacgctcgcaggggacaagcagctttccccggacgacgccacccgcgccgcctgcttctgcaccaccgtgtcccccatgttcgcgatcgggagcatcggcgcgcggcttttgtccgatcaggccgcgggcgtagccatctacctgtgccatatcgccgcgacgctcgtcacaggaatgctcttccgcttctacggaaagccccccgagatcaccgccgcccgccccgccgggcgtacggacaacctcttaaacgaggcgatggcctcttccgtctcgtccgtgctggcggtcggcgggttcatcgcctttttctacaccgtcgcggcgatggcggcggacttttccctgctggaatttctcatccgccccctgtcctccctcctgggcgaacgggagctggcggaggggctcgtgtacgggctgctggaatgcacgacgggcagcaaaatcctcgccgcctccgaaagcgcgctcgtccccgcgctgatcggctttctcgtcagcttcgggggcgtctccgtcttctgccagaacctcgttttcctgaaaaaggcaaacgtaaagaccgccgtttaccttctttcaaagataacgcaggcggtcctcagctttctctttctctggctctatacgcttttatga

SEQ ID NO: 1245 - DNA, 513 bp, Clostridium phytofermentans
  misc_feature: SEQ ID N?2993707
gtgaaaaaaattttaattctggggagcatcaacatcgacctgacaatcgaaacgccttacattcccgccgcgggcgagacggtcacggggcgcaattttctcgtgaatccgggaggcaaaggcgctaatcaggcggttgccgcgcgacggctgggcggcacagtctgtttttccggctgcgtgggtgacgatgcgttcggaagggagtcgatggaaaattttcaacgctgcgggctggatatctccggcgtgcgcaccgttgaaaactgcccgacgggctgcgcggtgatagcggtctgcggcggggataaccgcattattctggatcgcggcgcaaatgccgccgtcacctgcgcggatgcggacgcgctgatcgggcgggccgcggcgggagatatttttctcacacagctggagatcgatctttccgtggtggggtacgcactgcgtcgggcaaaggaaagcgggctttataccgttctgaatccggctcccgccgacggaagaatcgtg

SEQ ID NO: 1246 - DNA, 267 bp, Unknown
  BMI gene
  misc_feature: SEQ ID N?2997147
atgatttcacgcgaagtcgtcatcaataataccctcggtctgcatgcaagacctgcgatgttcttcattcagaaggctaattcctacccttgctccgtctggattgaaaaggatgaccgccgcgtcaacgccaagagcctgctcggcgtgctttcgctcggtatcgcaaaaggaatgtccgtgaccctgatggcggacggacagagcgaggaagccgcgctgaacggtctgtgcgaactgatcgacagcggtttcgctgaaatctga

SEQ ID NO: 1247 - DNA, 525 bp, Ruminococcus lactaris
  misc_feature: SEQ ID N?2998918
atgcgtcaaatattgtatgataaatataaatattatgagagggagggtgaaaccgtggaatcttatttctggctgattctgtttattgttttcctgatttttgaggtaattaccttaggacttgcaaccatctggtttgccggaggagcatttatttctttctggatgtcggttgccggtattggttttatatggcagattatagtattcttcctggtgtccgtgatactgctctgtacgacacggccgctggcatcgaagtatctgaataagaatacgacaaagacaaatgtggaagaactgatcgggaagcatgtaaaggtttcagagacgattgataatatcaatgaaacggggcatgttatgattaacggtgtagaatggctggcaagggcaaaacatgacgggatgctgatacagcagggtacggtggtatgtattctggagattaacggcgtgaaagcgattgtgcagccggtaagtatgatgaatcatccggtacaggaaaagaaagaaaatgattag

SEQ ID NO: 1248 - DNA, 1251 bp, Unknown
  BMI gene
  misc_feature: SEQ ID N?2999952
gcgccagaccccgaggacggcatcgatctggacacgctcagggcgtacgcgaaggagtgggtggtgaaggcgttcggccccggagcgacggccgccatcgtctaccacgacgacaacgacgagcgcctgaagaagggcctgcagggaataccccacgcgcacatctgcatcaacgcgctcaacacgcagacgggcaggaaatggcatttcgcgaaagacgacctcgcccgccaggcgaacgtcgcgcaggagctcgccgagaagtacagcctggcgccgttgccgaaaatgaggacgtccgacgccagggaagatcccttgaagacgatgcgcatctgcaggacgaaggaggagtgcgcgatgctcgccaaggggttcgtgccttacaaggagtccatcaggaaggccgtcgccaaggcgtgcaggacggccagcagctgggaccagttcaaggcggccctcgccgacaagggcgtgagcgtgaccataaccaggagagggacgctgacgtactgcgactccaacgggcgcaaggccaaggagcagaagctcggcctgaacttcggcatcgtcgcggtaggggaggccatcaagcggaactcgtccgagtccgtatccctccccgacgtcgacgccacgccggcgacgtacgacgtctccctcgtgaggaggcgggggaaggtcgagtgccgtctcggcaccgagaggctcgtatggcacgaggaggcgggatcccgctggcagcacctcgacaacatcaagtcgctcgagcgcgcggccaaggtcaaggagatctacgggatagtcgacggcgaatcgtactcccgcaccctctcgcatctcaacctgcagctcgaagaagccgccaggaaccaggatccggccgccgcccggatccggtgcgagaaaaagagcgtcatgtacgcccaagccgttatagacctcgcgtccgcgcgcaagcgcataggcgacgaagcggtgctgtcgtattccgagtcgctgctgaggcagggccgccagctcggcgtggccaacatagagagcatcgccgccatagcgcgcagcaacggcatcgaccgcacggaaggatggcgcgccggggtgctcgccgccgagcggatcatgtcgtcgagggagacggccctgcaggacgccctcgtcgaaggatcgtgggcgcgcgacgtcgcacgatacgcggaagcggtcgcggccatgcgcggcgacgcgggggcaaaggggctgctcaagccc

SEQ ID NO: 1249 - DNA, 1032 bp, Unknown
  BMI gene
  misc_feature: SEQ ID N?3003769
atgagtaagaatcaatccgtgaagaagagacagaagctggatacgcacacgctgtcccgcctgctgaaatttatcttcaagaactttaaactggaattcatcgtgctggcggtctgcgtgctgctgaacgccgtttccgtgctgacggcatccatcttcctgcgcatcatcatcgacgagtgcatccgccccgtgctgatccagtccatcgggctgcaggaggggctcgcaaacctcacgtccgtggcgatcatcatgggctgcatgtacggcgtggggctgctggcgaactttatccagacgcagcttctggtcacgatctcacagaatctgatgctgaagatgcgcacgatgatgttcaacggcatgcagcggcttcccatccgctacttcgatacgcacacgcacggcgatatcatgagccattacaccaacgatacggatacgctctaccagctggtggcgcagagtatccccgccatcttttcggcgggcatcatgatcatcgcgctcttcttcgtcatgatctcttacagcgtctggctgacgctggtggtcctgctggtggtcgtctttatggcgatcgtggcgaagaaagtgggcggcaagagcgccaggtacttcgtcaaacagcagactgcggtcggcaagaacgagggctacatcgaggagatgatgcacgggcagaaggtcatcaaggtattctgccacgagcgggagagcgaagaggggttcgacaagatcaacgacgagctctgccgcgtctccgccgaggcgaacgtcgcggcgaatacgctcggcccgatcatcggcaacatcggcaacatgctgtacgtcctcctggctttcatcggcggcgtactgctgacgctgggcgcgcccaacctgaccgtgaccggaatcggcgctttcacgacaggcgccatcgtgtcctttctgccgatgagccgcgtcttcaccaataacttcaacaacgcttcccagcaggcggcgttcatcgcgatgggcctcgcgggcgccgggcgtatcttc

SEQ ID NO: 1250 - DNA, 195 bp, Clostridium scindens
  misc_feature: SEQ ID N?3005166
atggatagaatctatatcgttaccggcgccaacgggcatttgggcggcaccatcgtccgtatgctgcgccgggcgggcgccacggtgcgggggctggtgctccccgccgagaaggtggcggatgccggcgccgtccggtatttcaagggggatgtccgggacaaggccactctggagccgctgggccccgctcac

SEQ ID NO: 1251 - DNA, 774 bp, Unknown
  BMI gene
  misc_feature: SEQ ID N?3006342
atggaggaaagagatatgcgaaaaaaaactgtagcagcaaactggaagatgaacatgacgagaagtgaggcaaagagtcttttgggagagttggttccgatgctcaaagacacggacacggatatcattatctgtgcaccttaccttacgattcagacagttttggattgcgtagaaggtactgatatccatgtgggcgccgagaatatgtattttgaggacaaaggtgcctatacaggagaaatatcacctgtgatgctgaaagaagcaggagtaacccatgtgattctgggacattctgagcgcaggaaatattttggtgaaacaaatgagatcgtaaacaagaagattatcaaagctttggaatacggtcttgtaccgatggcatgctgtggagaatctcttgagattcggggtgatggtctggcaaaacagtatattcacagacagattatggagatgttgcagggagtacagaaggaagatgtcagcagctgtatcttttcttatgaaccaatctgggcgatcggaacggggattggagcaacaaaggagcaggcagaggaaggctgcatggaaatcagaagaagtattgagagcatttatggcagtgatgtggcagagaatgtgactgttttatatggcggtagtgtaaatgcatcaaatgcggatactatcttcccaattaaggatattgacggcggacttttgggaactgcgagtctgaatacggattttgcaaaagttgtaaaaatacgagaaaagtatgattaa

SEQ ID NO: 1252 - DNA, 594 bp, Desulfitobacterium hafniense
  misc_feature: SEQ ID N?3008301
atggacgaacggctgaaaaaacaactggaatttctctctgtgatcgacaggatgaagagtatttaccgccgcaacgtgattgcggacggctccaggcggggagaaacggacgccgaacacagctggcatctctgcctgtatgcgatcacgctcgccgaatacgcgccccgcgggacggatatcgaccgcacggtgcgcctgtgcctgacgcacgacctggtggaagtctatgcgggcgacaccttctgctacgacgaagcgggctaccgcgacaaggaacagcgggaacgcgccgccgcggacaggctgttcgccctgctcccgcccgaacaggaaagagaattccacgcttactgggaggaatttgaacaaaacgagacgaacgaggcgaaattcgccaacgcgctcgaccgcatgcagccctttttgctgaacgcggcgaccgactttcacacctggcaccagagcgccgtgacggcagagaagattctggagcgggaagcgcccgtaaaagaatatttcccggacgtgttttcgtatgcggaggcgtgcgtgaacgacgcgttgaagagcgggctgatcaaagaacgctga

SEQ ID NO: 1253 - DNA, 267 bp, Unknown
  BMI gene
  misc_feature: SEQ ID N?3008857
atgggcgacaaaaagtctcccttctatcgtatcgtcgttacggacagcagaaacgcgcgcgacggggcgtatatcgacaaggtcggtcactacaatccgcttaccgttcccgccgagatcgtgctggacgtggaaaaggcgaaggattggatctccaagggcgtacagccgaccgagacggtcaaggcgatcctcgttcagcagggcgtcatcgagaaatccgcgaagctttccgctcccaagaccaaggtcagaaaaaagaagtaa

SEQ ID NO: 1254 - DNA, 804 bp, Clostridium botulinum
  misc_feature: SEQ ID N?3009757
atgaaaaactttgatcatcacatcgagaccgaaattttgttcgggaaagggaaaatcaagggcttcggcaaaaagatcgccgcggtgaccgacagcgttctgctctgctacggcggcggcagtatcaagaagaacggcgtttacgacgcggcggttgccgaactcaaagcgaacggcgtgcgttatgaagagctctcggggatcgatcccaatccccgcatcgagagcgtgcgggcgggaatcgcgctggtgaagaagcatcgcctgggcggcgttttggcggtgggcggcggatctgtcatcgactgcgcgaaggcgatcgccggcggcgcggcgacgccgcacgaagacgcctgggatctggtcgtcagttctgcgttcaccgcggcgctgcccgtcttttccgtgctgacgctttccgccaccgggtcggagatggatgcattcgccgtgatcaccaacttcgagacaaatgaaaaactgggctgcgtcgtggcgcgccccgtctgttcggtgctcgacccatcctatacctttaccgtgcccgcacatcagacggcggcgggcagcgcggatattctgtctcatatctttgaatcgtatttttccaaagtgcggaccgcctacgtgcaggatcggtttgcggaggcgctgttgaaaacggtcatccgctacgcgccggttgccatggagaagccggacgactacgaggcgcgcgccaatctgatgtgggcttcttcgctcgccatcaacgacctgatcaaagagggaaagggggaggactggacggtgcacggcatcgaa

SEQ ID NO: 1255 - DNA, 474 bp, Unknown
  BMI gene
  misc_feature: SEQ ID N?3010870
atgagactgagaacggcagcgcttgcggcgcttcttctcgcatgtgtttttctttcgtcatgcgggggatttgagataccgatactgatcggttcccgcagagagagcggcacgacggagacggcgaaggacgcgcccccctccgataccgacggggatcggggcagaacgggttatatatccgtgccggaatgcactcccggcgatgttctcggatacttcaacgaggttgcactgaaatcggaatacggtgaggatccgggggttctgtgccgctgggaggataagatcgtatacgaaataaagggtgacgcgacagaggaggatatcacgctgatcgaggagcttgccgcgcgtctcaactcgatcgagggattccccggaatacgccgcgcatcgggacttgcgcgtgcgaatcttgtgatcagcttcaccgaccgcgacgatatcgcggcgtcgttcgaagcggcggat

SEQ ID NO: 1256 - DNA, 558 bp, Ruminococcus obeum
  misc_feature: SEQ ID N?3010935
cagaaaatattaaatctttattacggacttgcagaagatgcccggaaagagggagcagagctgctgcagccaacagaggacacagtaaccttcagcgatggaacaagcgaagttgtaaatggatttgatattccggttccggcgattgatgaagaatttgatttggcactgataggaacaaaaggaacatggtatgaccataaggtcagggtttccaatccgcagaaggaagaaaccgggactctggaagacggcacttataccatggatattacatttgaaggcggaagcggaagggcatccatagaatcacctgttaccataaatgtgcagggcggtaaagtgactgcggatattcagtggagcagtccgaactatgactatatgatagtggatggagaaaaatatctgccggtcaatacagagggcaactccgtctttcagatacctgtgactgcgtttgatgagcctttgaccgttattggcgacaccgtagccatgagtacaccgcatgaaattgaatataccataacatttcattcagatacagtgaaataa

SEQ ID NO: 1257 - DNA, 1236 bp, Unknown
  BMI gene
  misc_feature: SEQ ID N?3014465
tcagagaatgcacttacggcggtgtcgctggcatttccgctccagacactgctgattgcggtcggaacgggaacaggtgtcggtatgaatgcactgctttcacggtctctgggagagaaaaattatgaaaaagcaaatcacattgcaagaaatgcagcatttctgtattttctgagttatcttctttttctggttctgggatttacagttgtgaaaccgttctatgccagccagatcggcggggcggacagtgaaatcatggaacttggaattgaatatctgagtaccgttatgatattttcattcggtctttttacccaggtatttttcgagaggctgcttacttccacgggaagaactattttcagtatgacatcacagctctgcggtgcagttacaaatattatactggatccgattctgattttcgggctgctcggagcaccgaagatgggagtaacgggggcagcagtggctaccgttatcgggcagtgtgtggcaggtattgtggcagctacatgcaatcataagtttaatcatgagattaaacttaatttcaaaggattccgtcctgatatcagaattatcggaatggtctatgcaatcggtattccatccattattatgcagtccataggttctgtcatgacctattgcatgaaccgtattctgatcggattttcatccactgctacggcagtatttggagtatacttcaagttacagagcttcttctttatgccggtattcggactgaataacggtattacaccgattattgcatacaattatggggctgcacagagaaaacgtatgatgaagacgataaaactcagtatgatagttgcattctgtcttacttttatcggatttctgtgttttgaaatcatcccacagacattgctcggtatgttcaatgcatcagaggatatgctgaaaatcggtgtgccggcactccgaatcatcggaatccattatctgatcgcatggttctgtattgtatgtggaacggtattccaggcactgggaaaagcaattttcagcatgcttgtgtctattatgcgacagttggttgtattaataccggcggcatatctgttggcaaaatttggaggattacatatggtatggtggtcattcccgattgcggaagtgatttctcttgccgtatcgctgatgttccttaggaagatttacggaactattattaaaaacataccggaaggcagggaatag

SEQ ID NO: 1258 - DNA, 1251 bp, Unknown
  BMI gene
  misc_feature: SEQ ID N?3015468
atgtttaacagcgaagagcggaccaattttgcagtgattaaggtcataggcgtcggcggcggcgggaacaacgccgtcaaccgcatgatagaagccggcattacgagcgcggaattttattccgtgaacacggacaagcaggcgctgctcagatccaatgcgcagaaccgactgcagatcggggcgattctgacgaaaggattgggggcggggtctcttccgcaggtcggcgagcaggctgctgaggaaaatcgggaagatctgaccgaaattatcaagggaacggatcttctgtttatcgccgcaggcatgggaggcggtacggggacgggcgccgcacccgtgatcgcgcggattgcgcgcgaaatggggatcctcaccgtcgcggtggtcacaaagcccttctcgtttgaagggaaaaagcgcgcggagaatgctgcggagggaatcaataacctgaaaaaatacgtcgatacgctggttgtcatcccgaatgataaactgcttcaggttctgcccagcacgacttctttttacgatgcgttcaaagttgccgacgatgtgctccgccagggaatcagcgggatcgtcgatctgatctccacgccttctctgatcaacctcgattttgcggacgtcaatacgatcatgaaagatcaggggctcgctcacatggggctaggccgcgcaaagggcgagcgccgcgtcatcgaagcggttcgccaggcggtttccagtccgctgctcgagacgacgatcgagggggcgaagggcgttatcctgaatatttcgggcggaagagacatgacgctgacagaagtcaacgaggcggcaagtctcgtgcagggggtaatcgattcttccgcaaacatcatcttcggaaccacggtggacgaatcgattacggatgagatttccattacgattatagccaccggattttcgggcgtaacggaggaagcggtggaacagcccgccgcgaaaaagcctgaatttaccaaggagagccgcaatattcctcccttaatgatggatcttgcggaagagaagaaagaagaagtacagcccgtggtcgaggtggagcggcgcaccgagcgcgcggcagagcagaaggcgccttccagaccggcgtttatggagacgcagaaggcggaagaagaggatgaatttgatattccccgcccgcgtttggaacagaaaaaagaaaaagaactcccgacgtttatgaaaaagctattcgggaaaaagtaa

SEQ ID NO: 1259 - DNA, 522 bp, Heliobacterium modesticaldum
  misc_feature: SEQ ID N?3015673
atgaaaaagtatgagattattgaaattccagcaaaggataccccagctgggcggcgaccggaccgacagttaagagttgccgcgtactgccgtgtgtcaaccaatctggagatgcagcagaacagttaccaatctcagaaggactactatacgaagttgattgcctccaatccagcatggacactggcggggatttttgcggacaagggaatcacaggcacatccgctgcaaaacggcctgcgtttcaaaaaatgatccggtactgcaaggcgggcaaaattgatcttgtaattacaaagtcgatttcccgctttgcccgaaatacactggactgcctgtattatgtcagatgccttcaagaacttgggattcccattgtttttgaaacagagggcttgaatacagcgcagatggacaatgaattgattttgaccatattgggcgctacctcccaggcggaaagtgaagctacaagcagccgtgtaaaatggggcgtgcgggcggcctttcgagaggggcga

SEQ ID NO: 1260 - DNA, 612 bp, Clostridium methylpentosum
  misc_feature: SEQ ID N?3016755
cggctggtggtggacgtgccggaagacaagaccggctccgtcttttccagcatgggaacgcgcaagggggaactcttgcagatggagaacgtcggcagccggattcgtctggaattcgccgttcccgcgcgcgggctcttcggctataagagccagtttctgacggatacgcgcggcgaaggggtgttcaacacggtatttatggaatatcagccctacaaaggcgagatcgagcgccggctgacgggttccctcgtcgccttcgagacgggcgaggcggtcacgtacggcctcttcaacgcccagggcagagggcagctcttcatcacgccgggaacgcccgtctacgagggcatggtggtgggcgtttcgcccaaggcggaagatatctccgtcaacgtatgcaagcggaagcacatgaccaacatgcgcgcctccggctcggacgacgcgctccgcctggagccgccgcggctgatgagcctggaggaatccatggagtttttgggcgacgacgagctgctggaggtgacgccaaagagcatccgcatccgcaaaaagactttaaacaccgagcagcggctgaagaaaaaggcgagaggcctggaataa

SEQ ID NO: 1261 - DNA, 465 bp, Unknown
  BMI gene
  misc_feature: SEQ ID N?3016769
atggagaatatacaaagcaagcaaaacgcgggagcggtaaaaatcagcccttccgggcatccgaaagggaacgggaaaaacgccttcgtccggttcttcaaaaagaacggcgccgggttcgtattcgcccttccggtaacgctcggcctgttgtttttcaccgcttatccgctgctcgcatccctctattacagcttttttaagacgtatacggtcatccgtccgcccgagggcttctcgctgacgtttaacttcgccaagatgttttcggatcaggaatggatcaaggcaatcgcaaacacgggcatttatacgctgatcagcgttccgatgttcatggtgctctcctttgcgctggcgcttgctttgaattcccgcattaagggaatcggcatctaccgcatgctgatctatatgccgtgcgtaatgtcggcggtcgtttcgggcatcgcgtggcgttcgctt

SEQ ID NO: 1262 - DNA, 219 bp, Unknown
  BMI gene
  misc_feature: SEQ ID N?3019202
atggaaaacgacaaagaaaaatttaaaataattgaaaaattaaatgcaagaatacaggctttaagccaacacgaggagcttaactccgatgaaattccgatgacactccagatgaaggcatacttatatgatttttctcttgaagacaaatcaataacaattgcatttccggttcagaaaaagcagcttaatcccaataaatcaatggtcggcggactt

SEQ ID NO: 1263 - DNA, 462 bp, Unknown
  BMI gene
  misc_feature: SEQ ID N?3026023
gccgccactgtcactgtggacgataacacggtggttttttccaaggtcgaaacggccgggtatgccgatcagctccaggagcttcccgaagagcagaaggattactataagcagctgaaagagcatatttctgcgtttggcgagatcaaggaagtcgtcgcgaacaagtacgagaccgtttactataagggtagaaatctgttgattcgcattcagatcagaaaatcgcagctcctcctgaaattcgagcttcccaacgaacagctgaacgattatgcgcgcatcagcaacgacaagtatatcaaagaaaagctctttgaaatccgggtttccgacgaacctgcgctcaataccgcgctgaaggtaaccgatatcgcgcgggaacgcatcgacgcggagatcgaaaagaaaaaagaagagcgccgcgcgaagagaagagccgcggcagcagcgaaaaattaa

SEQ ID NO: 1264 - DNA, 561 bp, Parabacteroides distasonis
  misc_feature: SEQ ID N?3026580
atgatcgtcaaggtgtgcgggctgcgcgatcccgacaacatccgcgccgtcgaacggctgccggtggacctctgcggcttcattttctatccccgctccccgcgctgcgtgcccgacgacgagttccatgccgcggccgtgcgcagctgccgcaggcccgcggtcggggtcttcgtgaacgcctcgcccgccgagatgctccgcacggccgaacgcttcggcctcgggtggctccagctccacggcgacgagtcgcccgaagcgtgcggggagcttcggcagcgcggcttccggatcatcaaggcgatccgcgtcgcgtcggccggcgacctcgcggcggcccgggcctacgaagactgcgccgactacctgctgttcgacacccgctgcgacggctacggcggttcgggacgacgcttcgactggtcggtgctcgacgcctatgcgggccgcgttccgtttctgctcagcggcggaatcgacgcggagtgcgccgaagcggtccggggattcgtccatccccgtttcgcgggcgtggatctcaacagcggattcgaaacg

SEQ ID NO: 1265 - DNA, 588 bp, Unknown
  BMI gene
  misc_feature: SEQ ID N?3028668
gttcatgtgggaaaagataattacgtcagcaagattacgggacaggcaaaatatatcaagaagccgaattccgagatgctgcgttccatccgcatgattattaaaatcatcagtattctgctgattcctgtggctgcgtgcctgttttacaatcagatggaggttccggaaataggtttgaaatctgccgtcgtcagcaccgtggctgccgtgatcggaatgattccgtccggtctggtcctgctgaccagcatggtactggcggtaagtgtgatccggcttggtcagaagaatacacttgtgcaggaactgtactgcatagaaacccttgcccgtgtggataccctctgcctggataaaaccggaacaataacggaaggtgtcatggatgtggacggagtcgagattttatctgataaatttaccagggaacagatcgatgaaattatctatttctttaccaatggactgaatgatacgaatccgaccttccaggcacttgaagcatattccatgaaactatatgagaaaaaccgtgcaaagctggaaaagagggtgcagtcctatcatgtggtccagaagatcagt

SEQ ID NO: 1266 - DNA, 741 bp, Clostridium thermocellum
  misc_feature: SEQ ID N?3032089
atgtccggccacagcaaatgggcaaatatcaagaataaaaaggcgaagacggacgcggtgagaggccgggtcttcaccaagatcggcagggagatcgcggtcgcggcgaagcagggctccgatccctccaccaactccaaacttgcggacgtcatcgccaaggcgaaagccgccaacatgccgaacgacaatatcatgcgcagcatcaagaaggcggcgggagagctttcgggcgtcaattacgaatcgctcacgtacgaggggtacggtcccggcggttcggcgatcatcgtcacgacgctgacggataacaaaaaccgtacggtcggcgacgtgcgccacgcgttcgacaagcacggcggccagatgggaaacaccggctgcgtctcctttacgtttgacaacaagggcgtcatcgtcgtggaacgcacggtggagatgaccgaagacaagatgatggagctcgccatcgaggcgggggcggacgacgtcgtcaccgaggaagattccttcgtgatttacaccgcgccgaacgacttctctgccgtgagaacgtatctggaaaacgcgggcgtcacgttcatcgaggcggaagtcagcatgatcccgcagaacaagatcacgctggacgaggcgaatctcgtcaagttcaacaaattggtggatatgctcgaggatctcgacgacgtgcaggacgtctaccacaacgtcgaactgcccgaagaggacgaagaggcgtaa

SEQ ID NO: 1267 - DNA, 681 bp, Anaerostipes caccae
  misc_feature: SEQ ID N?3032160
atggacaggattacgccgcgccatctcggcattatcatggacgggaatggcagatgggcacaaaagaacgggaaaaagcgccagtacggtcaccgcaagggcgcgatgaacgtggagcggatcgtggagcacgcttttttacgcggcgtttcggtggtctctctcttcgctttttcctctgaaaactggagccgcccgcaggaagaggtggatgcgatcctcaatctcatccgcgactacttcgaccgctacttaaagcgtctcgtgaaaaacggcgtttcggtgcgggtgatgggggatgtttccgccctgccggaagatctgcgggaatccgtcgcccgggtgacggcggagaccgccggcgggaaaaacattctgaatatcggcatcaattacggagggcggcaggcgctcgtccgcgcggcggaaaagctcaggcggggcagcgtccccgtcacggacgcgacgctcgcgggcgcgctggatacggcggggctccccgcgctggattttctcatccgtacgggcggcgaaaagcggctctccaacttcatgctgtacgaatccgcctatgcggaactgtattttacggacgtttactggccggatttcgacgaaggggagctggaccgcgcgctggaggaattttcctgccgttcccgccgcttcggacatctgtag

SEQ ID NO: 1268 - DNA, 1062 bp, Bacteroides capillosus
  misc_feature: SEQ ID N?3034076
atgaagattcgtatcgccagtgtgatgctggccttcggtctgaccctctctgcggcgacggtggcttttgccagcgaaaccggggaagtcaccggcattttgcaggagacacaggagcagactgagcagacggcgcagttctacctggacggcgagcccctttatggtgttgtggccgagagtatcaacggcacgtattacgtgactctgtcctctatgctgccgctgattgacagcagcgccatcgtggaagaaaactccggggcggcggctgtaacagcgcaagctgttgtggtagaagaatccactccggaggaggcgcctggcttggacgggcagatagacgtgcctgagaccctgcagggagaggaagcacagacaggagatgtcctaactaccttccgtgcgctggagatgggcgcgaagctgctggccagcccccttgagaatgagattcagacggagagtgatgctgaggccgaacctacgccggaggcggtagtcgaggtggtggatacccttacgctgtcagctatggctggagagcagtacgtggtagccaatggccgttatctctatgtggaggatggagtcattactttggacggcgcagtagctgttcccgtgcgagtgctggccaaggccatgaatatgactacgatgtatgatgcccagactggcctggtttatctcactagcagcgaggagattggctatttggaggacggggatacctactataactccgattcgctctattggctgtcccgcatcatctactgtgagagcggaaaccaggtcctgaatggcaagatcgctgtaggcaacgtggtgctcaatcgggtgaaggatagccgtttcccagacacgatctatgatgtcatcttccagaagaatcagtttagccctgcttccagcggatccatctaccgggatcccaacgaggccagcgtcattgctgccaaactggtactggatggtgctgtggtgctggaggatgccctgttcttcaatcgggcgggcttggtatgctacgcatctaagaaccggccctatatcact

SEQ ID NO: 1269 - DNA, 684 bp, Clostridium thermocellum
  misc_feature: SEQ ID N?3035293
atgttcaagacaatatttgaagcaacaagtacaatatcaaccactgatgcactcattagcttaggagttgcagtaatactgggtatctttttaagcctggtatatgtatttggagatacaaaaaagaaatattcatacaattttgcatttgcactggttatcctgccggtatgcgtatgtgccgtaattatgttaatcggttcagacgttgcaagggcaatctcacttggaggtgtatttgcactggtacgattcagaagtgtaccgggcaattcaaaagatatcgtaaatgtattttttgccatggcaacaggtctggcctgtggaatggggagcgtgttgtttgcatccgtattctgtatcggtgtcggaatcatctatttcgcattcagccgtcttggatatgcacttcagaaaacacagccaaagcagttaaaaataaccattccggagaatctgaattatcagggggcatttgatgatctgtttgaagaatatacaaagagtgtcatattggaaaaagtaaaaaccacaaatctgggaacgttatatgaattaacttattccgtggaattaaaagaagatattaatgaaaaattatttatcgattccctgagatgccggaatggtaatttaaacattgttcttggaatcaaagaagagaatccgaacatggctttttaa

SEQ ID NO: 1270 - DNA, 525 bp, Unknown
  BMI gene
  misc_feature: SEQ ID N?3039344
tccaaggatcagtccttcccggacggaacggtcgaagacggattatatggcaatttttccccatatgtatgcaacggtccgcgtgtccacgaatttctccaggaaatgaacagtcgcgtactctcccattacgatctgctcaccgtcggtgaggccgccggcgttaccatcgaagaagcccagaaatatgcgaacaatgaaggaaccgagcttggaatggtattccagtttgagcatgtggatctcgtaagaggcccgattgggaaatggacggatcagaaaccgaagctggctgacttccgccatattatgaacaaatggcagtatgagctggaaggcaaggcatggaacagccttttcctcgataaccacgatcagccgcgtgctgtctctcgttttgcaaacgactctgaaaaataccgcgttgtttctgcaaaaatgctcgccacctgcctgcacatgctcaagggtacaccttatatttaccagggcgaagagctcggtatgacaaacgtttactttgac

SEQ ID NO: 1271 - DNA, 564 bp, Bacteroides capillosus
  misc_feature: SEQ ID N?3041109
atggcagtgcgatccgcagtgatttttgtcccggatgatacgggaaagacgggctatgaaaggccgatgtttttgcagcggatcatgggcgtgccgatgctctcctggctggtgcaatctctgctggccagcggcgtaagccgctattttcttgtttgcctggacgcccatcgggcggaggcgaaaaactgcttcccggcggaggccgagctgatcgtagcctctgacgcggaggcggcggatctgatgcatgtatttctctcgacggcggaagagtttgagcaggaggtcatggttgtgaccgggccgtgcatccgcatcaatgcagaaagcgttctggagggcgaggaggaagcgccgcgccgggcctgcgcctgccgcgttggccgcgaggtttttatggacgcgctgggcggggaggatttttccttcagccatttcttggtagaatgcggcgcggcctatacagatcatgacggtatgttcaccgtttcggaccgggaggagctggccgattggcagccgatcctgaagcgggcctatctctacgagctggcgcaccag

SEQ ID NO: 1272 - DNA, 210 bp, Unknown
  BMI gene
  misc_feature: SEQ ID N?3041567
gccgttcaggtcgaatattacctccttctggcgcagtacggggaggaatacgaaaaaggagacgaggcttcccgcgcgcgttacgtaaacagaaacagggctttttacgaattcatcgtgaagaacggcatctacatgaacccggataagccgctgccgaaagacgttgattttacgaaggcgccggatacgtggcataaattggggtag

SEQ ID NO: 1273 - DNA, 360 bp, Unknown
  BMI gene
  misc_feature: SEQ ID N?3041574
atgctttcatttctggcgattacggaggcggtaaaggggctggtggaggagcggtatccggggaatacggtctatatggagcgggtaccggtggactttgcgcggccgtccttcttggtggagctggggccggtggagatgctggacgcctcgtgcggctgcctggaggtcaaggccacggtggtggtcaccgcctttgtggaggcggacgactactataacagccacgtgccggacctgatgacccggatgggggcggtacaggagctcttcgcggtggacggactccaggtggaggaccggttcctccacgtgacggccaacaagggcaactgccaattcgactacgcggagaccagc

SEQ ID NO: 1274 - DNA, 597 bp, Clostridium asparagiforme
  misc_feature: SEQ ID N?3041736
tttgaggagatcatggagggaatggaggagaagattcgcggaaagaatccttctctgatggaagttagggaggatttgaaactgccgtcccactgggaggattccggggttcgtcttctgtggtattcggagaatccggagtggatcagcgcggcaggtaagattgaaaaaacggtggaggaaccgcagaacgttcagcttcaggtgcatatgagtgccggaaagtatcaggcagaatatctgatatttcttcgtcttatgccagcgatccagacggatgaggaagccctcagatcgggattaatcaaggaaattgcaaatcgggaagagagtgatcggagtgaaccgtggatggagcttcctgaaatttatgagggaagaaaattaacttatcggaagaaagaggaaaatctgtatgcagtgattccgattcttggagtggtgatggctgtcttgcttttgagtcaggagggcgcggaacagaagaaaaaagaaaaacttcgggaaaaagaactgctgatggattatgcggaactcgtgtcaaagctgatggttttaatcggtgccggactaacggtgagaagtgcgtgggagcgc

SEQ ID NO: 1275 - DNA, 222 bp, Bacteroides capillosus
  misc_feature: SEQ ID N?3042513
atgtctgatcagaccaaccagcagcagcccgtccagaccgagccgtccctgtctgagctgctccagatccgccgggacaagctcaccgagctgcagaaggcgggaaaggacccctttgctatcacccggtatgacgtgacccaccacagcagtgaagtgaaagaaaacttcgagcagatggaaggccagaccgtccggctggccgggcggctcatgagcaag

SEQ ID NO: 1276 - DNA, 1329 bp, Unknown
  BMI gene
  misc_feature: SEQ ID N?3043564
gccccgcccgccaatcagattcacgaatggggcggcgccgtcaacctgtattacaccaatatccccgcggatacgacgaagggcgtcggcagcctctcggctgatcagctcaaggagatcggccagtacgataaggtggaggtaaaggccgccgcggcgaacggcggaaagacctacgaggtcgcgcagatcacgtatatctatgcgaaccagacggcgattaccctcagcggcaaggcgtacagcgagctggtctccggcgatactctcacgctgaaagcggggtactgcatttattatctcaatcagggcgcggcgattgcgctctcccggctgacggaggactgcaagttcgtctggaacggcgcttcctgggagaacttcacggcggaagcgaccgaactggaactggagaaagaggaaatcacgctccccgtcggcggatattacgaggtggagtacaacgtgcttcccgcgcattcctacgttaacgtgaccgttatctcctccgatccggagacggtggcggtccggggcggcgcgattaccgtactgaaggcgtccgatgaccccgtcacgatcaccgtaatgctgggaacggacgagagcaccgccaaagaattcgtcgtgaacgcgatggagctggaggtaatcggctatcagatctatcagccgcgcgaatacaatgtcgccttaaacggcacgtttgaactgaccacctatatgggatccggcgacgtccccgtcaagctgcaggcagtggaggacttcggcgacggcatcatcggggcgcccttcgatctggacgagacgaacacggtgatcggcgaactggatacgtccgagccgggaacgaagaccgtcacgctcaccatcgacaaggacggcgacggtgacgaatataaagcattcgataccgcggtcaccgtggtggtgagagacagtgcggcgcaggtgccgaacggcatcatgcaggagccgtttgatcagaattacgccgtcctctatatcgatttcagcggcacgttccggggagcggtcaacgttcccaagagcatcgtcgccgcctatcgggttgcggactttatcaagttcgtgcgcggcgaaaaagagtatcccgcgaaggcggacatcaacgggcagtatctcgtcatccagcccgtcttcgacgactccgtccccgcggcgcagcagcgcttccaaaagggcgaccggtgcgtcgtctctccgggaatgcccatgatcgagtggacgggacaggattccaattacgcgcccgtcggcgcgggcgactacgttgtcgcgggaaccatcgaatacgagacggtc

SEQ ID NO: 1277 - DNA, 198 bp, Unknown
  BMI gene
  misc_feature: SEQ ID N?3048082
atgttcccgtatccgtgcccgccgcattttccgaaatatactgccgatttcccgaaggaggaacgcacgttgaaaacagtccccgtcacaaaagaacagtttcccgtatttcaccgcctgctgaccgattattatcgggacggcgaagacgcgcagaccccgcaggaggagctcgacggctttatcgaaatgctcttc

SEQ ID NO: 1278 - DNA, 351 bp, Unknown
  BMI gene
  misc_feature: SEQ ID N?3049520
acaaaaatttacgctacaagtacaagaggagagtatgttatgtcagaatttagtacactattaaaatctgctttatctatgaatgatgtgagtaaccggagcctgtcacagactcttaatattgaccgcagccgtttccagaagattctgtccggcgagcggcatatggactatgatacatttgaatctatctgctcccgtcttacagtccccgaaaagttaaacgaagatttgcgtgtggcatatgctgtagaacattttgggaaagataattatgatgtgatacagcacattatcgaccgcctctgcaaaatggcaaaggctgaaaataagttctgcccccccccctag

SEQ ID NO: 1279 - DNA, 753 bp, Unknown
  BMI gene
  misc_feature: SEQ ID N?3055761
atgaaagagaaaaaacgtcgtttcgagaacgacgtaaccgagtacgagtatctttttcaggaaaaagaagtcaggggaaagaaaaagagccgctttttgggcagggttctgcgcaaaaatttctggtcccttttctggagctccgtcgtttatatcatcaaggcgtcgcccgtctgggcaacgcccatcgtgaccaccaacatcatcaacacgctcacgttctatctgaaagggagcatggagctttcggatgcgatccgaagcgtcgtggtcaacgcggtcgttctgacggtgctgatcgtacagaatattcccatgcacatgctgtgggcgaagatctgttccaggatgttccgcgaaaacagcgcgaataccaggagcgcggtcgtcaaaaagctgcagcggctctccattacctatcacaaggagatggagacgggcaagatccagtcaaaatttctgcgcgacgtggagagcatggacgctctgatttccaacattcagaacaatcttctgccgtcgattttcggcgtgctgatctccatcgggatttcgctctataacagtcgcatcatgacggtgtttttcctggtcgtgatccccgtcaacgtggcgctcgcgatgctcttcaacaagaagatgcgcaagaatttccgcacgctgcgcaaggacagcgaggaggtcgccggcaagctctccactatcatggaaatgctggtcgtgaccaaggcgcacgggctggaagagaaggaa

SEQ ID NO: 1280 - DNA, 732 bp, Eubacterium hallii
  misc_feature: SEQ ID N?3056613
acgggcaagagcacggtgctcgctacgatgggaatcgagctggactgcgaggcgtacgaaaacgcgctcgtctccgtcgcttcggacgcgtatcttccggataaggagagcgcgctcacgcgggaaacctatcagtacgatctccccgcgggcggcaggcagtttaccgagcggatgacgctgcgcggcgcgctgcggtcggagctgccgcagggcgcgcggctcatgagctgcggcctggttcggctgaatctctttacggatacgcagagcggttttgcggtggagggatcggtcgaggggaaagcctttgtcaaggatcccgaaaacaaggtgacggcgatcaccttcgaggcgcccttccgcatcgagcccgattacgcgccgtgcgagggagaaaaggtctcggtggacggcggcgtcgaggagatgaccgcgcgcatcgcatcttcggaagagatagagctctcaatcaccgcgcggatcgtcgtatccggaaggaagaaggcggaattcgccgcgattacggacgtcgccgaaggcgcgccgcgcgaagtgaaccattccgcgatcagcgtgtatatccctgcggagggagaggacctctggacggtttccaaaaaactgaacgcctgcccggaggcgatcatgcagtacaaccccgatctcacgttcccgctgacgggaggggagagaatcttaatttatcggcagatcataaaggattactga

SEQ ID NO: 1281 - DNA, 435 bp, Unknown
  BMI gene
  misc_feature: SEQ ID N?3060056
atgtatttatccgaattcattgagtctctcgccctctacggtctgcccgcggtcgtcatgtccgtgctcgcggaaggatgcacgcttctgctcgtcagactgtgcagaattcagaatacggcgctgaaaaacattctgccctttctcttcggcgtcgctttctcctgcctgtacagcctgatttttcagggagcggggagcgtctttaccgaagagacgctttatacgggcatactctgcggctcgctttccactgtgtacggagcgattctgaacaggacgctctcgaaaaaagcggagcccgaccgggagagcatcgtcatcggacagctgaacggctttgtccgcccggaagagctgtcggatacggcaaaagcgatctgcgccgcgctggaagaaggcgcggacgaacaggcgatccccgcggtcatcggg

SEQ ID NO: 1282 - DNA, 393 bp, Coprococcus comes
  misc_feature: SEQ ID N?3062402
ctgggactggcaaatcttgtggtgctgtccggattatattatctgccgcaccgggatgtatttctggtaagtgtgacgagaatctttctgtccacactgctgtttggaaatataatggcacttgcctacagtctggcggggggaatactaagctttcttgtcatgtcaggactgcagaagaaagatatcatgtccatggcgggagtcagtacggcaggtggaatctgccataatattgggcaggttattgtcgcagcagtcatattgcagagcaaaggagtatttttataccttccggtgctgatgatatcaggaatcgcagccggactggtaatcggactggcagcgggaaaaatcatgccggttctcataaaaggaaaattgtgtcagtaa

SEQ ID NO: 1283 - DNA, 537 bp, Unknown
  BMI gene
  misc_feature: SEQ ID N?3063523
atgaaaaaatggatgatggccgtaacggtcgtcgtatcaatcgccgtatttttcggttgcggtacttacgatgcctatccgccgagtggcgaggatggtttaggcggttttcccgcagtgtcggacggcgccgcttacgaggagaattaccgttacgactctgtggaggagcagggctttgtcctgcgtgaaaatgcgccctccgcggcgttttcgctcgaccgcaataccgcggcgtattcttatgtccggcggcagatcaacgatggcatgatgatcgcgcccgattccgtgcgcatagaggagatgatcaattatttcgattacgcgagttatccccttcccgcagagggggaggaagtcgccctcaacgcgcgggttgccgcgtgcccctggaacgcagatcataaactgctctccgtggggcttagaacggaagatatttccctcggagatgtgccgaataatctcgtatttctcatcgacgtgtccggctctatggcgggaagcgaccgcatcgggctggtaaaggaaacc

SEQ ID NO: 1284 - DNA, 762 bp, Unknown
  BMI gene
  misc_feature: SEQ ID N?3073787
ctcagatacggcgatatggctgtcgcagcgtcatccgaagaccgcagctttacctatattcccgacatggatgcaaccgctttccgcgagggcatcgattacgtacatttcacgcataacaacaccattttcggcacgcggttcacgaaactcccgaaaacctccgctccgctggtctgcgacatgagttcgagcattttaagtcaggaaacagacgtatccgattatggtttgatctatgccggcgcgcagaaaaatatcgcgcccgcggggctgaccatcgtcatcgtccgaaaggatctcgtcggaaaacagtcccctctctgcccgaccatgctgagctatgagacgcaggcaaaggaaaacagcctttacaatacgccgccctgcttttccatctacatggcgatgctggttttccgctggctgaaaaagctgggaggcgtaaaggcaattcaggcaatcaacgaaaacaaggcaaagctcctctatgacttcatcgacagctcatccttttacagaaacgaagtaatcccgcaggaccgctcgatcatgaacgtcccctttacgacgccggacaaagccacggacgaagcgttcgtcaaagaagccgccgaacacggattggtatccctcaaggggcaccgtctcaccggcggaatgcgcgcctccatctataacgcaatgccgacagagggggtaaaagcgctgatcgcgttcatgcagcaatttgaactgcggcacaagggaggtacggtatga

SEQ ID NO: 1285 - DNA, 582 bp, Salmonella enterica
  misc_feature: SEQ ID N?3076195
tctacaactccggttgtggaagttgagaatatcactgttacaactgatacattgagtcttgaagttggtgaaagtgtcagttttggctatgaagttttgccaaataatgccacagataaaagtgtaagtttttcctatgatgataagattatttctttggatgaacaaactcttaatgttgtcggtttaaaagaaggaaaaacaacaattgttattacttcgactaatggcaaaagcgcttctatcgctgttgaagttaaagaagcgacaaccgaagttgcaccaactgctatttctaccgattttgctagaactgtcatcggtgaaaacgaaacattgaaagttgatgttactttctatcctgctgaaacaactttaaagaatttgaaatttagaagctctgatccatcctgtattaaagtagatagcgcaaatcaaaccattactggtgttgctgctacctataaaagcattactattactatttcttctacggataatactttggtcaatccaattcgtttatcattgaaagttaccagcgatgaaaatgaggaaaaaaaatatgatatttccctgcca

SEQ ID NO: 1286 - DNA, 645 bp, Unknown
  BMI gene
  misc_feature: SEQ ID N?3076698
atgacaaaggcgatatttttcgatctggacggtaccattttggacaccgtccccgatatccaggacagcatcaaccgcatgctcgccgaaaacgggctcccgccgctttccgccgaagagatcgtgcgctatgtgggaaacggcgccaaaaagctggtggaccgctgtctgaaaggcagagtgaccgaagaacgggcggagcggtgcctgcaccgctacaacgagatctacacgaactgcggctcgcccaagacgcgtattttccccgggctttcaaagacgcttccccttctcaaagaaaagggatatctcctcgcggtcatcaccaacaagccgcaggaaacggcggacgaggtgaaaaagatctatctcgatccgttggggatctcctatgttttcggacagcgggaagggatccccgtaaagcccgaccccaagccgatggagatcgtcctcgcgcagttcgggctgaagcgggaagaggtcgttttcgtgggagacggcgaaacggacgcggcgttcgcgatcaacgcgggcgtcagaggcatctcctgcctgtggggttatcgcgaaaaggagcttctgttggaggtgggcgcgcgcgaatttatcgaccgcccggaagagctcctctccctcttttaa

SEQ ID NO: 1287 - DNA, 504 bp, Unknown
  BMI gene
  misc_feature: SEQ ID N?3077518
atgacagaaatcgggacaaaatcgtatttccaacgtctacaagaaataactccgaaaactaccattccaggatctcttttgtttcttggtacaggttcggcactcccaagcaagtatcgaaatggtttggttatagatcgattatcaccagtagttacaggtatgttactcaataactccattctccttgactgtggtgaaggaaccttgaatcagctcctccgagtaacctcagaagacgaagtccttactcgaatccgtgtggttctgatcagtcattcacatgctgatcatcacttgggtttgccacttctgttaactcagttagcgaggagagtgacagaagaatcaaagtacacagagaagcggccaaagagaatagatctgtctcctttactcattgttgggccacctcgagtacggttattcctggaaatgtggagtgcatttattccttcgatttcttccgtctatacttatctggatattccaataaccacgggg

SEQ ID NO: 1288 - DNA, 534 bp, Unknown
  BMI gene
  misc_feature: SEQ ID N?3083605
ctgctgtttgagccttacaccggggagcagaaacaggcggcggaagaacgcggcgaagcgctcccgaaccgcgaagcgcagtggattgccgccgaggcagcgcgcctgctccgcgaggaacatctggaggacggctctccgatccgcccctgcgacattgccattctgacgcggaccgccgcgccgatgcaagtctttgccgacgcacttgcggcatggggcattcccgcggcactgccgacaggagacgacctgctcgcttccccgctgatgaccgacacgctgaatctgctccgcgccgttgacaacccgtaccgcgatctgccgctttccgaatacctgctgacccctgcgggcgggttctctctggaggaactcggcgacatccgcgccgccgcgcccgaacgtcgcgcgctctatgacgccatgtgcgccgccgcagaatcggaatcgcacccctgccgcgaaaaagccgccgcgttcgtcgcgtggctcgaacactaccgcacgcttgcggcggggggcggccgcggc

SEQ ID NO: 1289 - DNA, 447 bp, Clostridium phytofermentans
  misc_feature: SEQ ID N?3085232
atgacagtcatgaccaacactaaagcacttattataagcggtggagacgtggattacaacttccagccggaaaactgccggatcattgccgtggacggtggtctggaagccgcaaaaaaaatgggacttgttccggatatcattattggtgattttgataccgtttcccctgaaattttaaaagaatatgaggatatggagaactgccggatcatacggctctgtccggaaaaagatgataccgataccgagagtgcgattaatcttgccatccgggaaggatttcgtgaaatcgatgtacttggtgctaccggaagccgttttgatcacacctatgccaatatgtttctattaaaaaaagcatatctgcagaatgtaacccttacgttttacaccggtttgagtaaaatatacctgatttccggaaagaaagaatatcacccggag

SEQ ID NO: 1290 - DNA, 1338 bp, Acholeplasma laidlawii
  misc_feature: SEQ ID N?3086484
atgaaattcaagcctgcaatcgataaaaattttcgcccgctgagccttgaactcgcggcgtttcgccgccgcgcgaagggcggaacgctgacgatcgtcatcgaggatgcggacggatataattttacttaccgtctgccagttacgggggacgtgaaggaagactatccgatcgccgagcgcatcgtcaagagccttctgtggatcgtggggggaaaccgcgtctatgtcgcgggaaacggggaaatttaccgccgcttaaaggccgattacagtgcggccggcgcacgcgcgttcgacgcggcgtttatggaacgggtatatgaaaagccctttgaagtagtcgacggagacgcgttcggcctgcctgcggaaaaccggcgttcggtcgcggtgggcaatgcgctgaacggctgccggatcgggttcgacgccggcgggagcgaccgcaaagtctccgccgtgatggacggagaagttctttacagcgaggaggtggagtggctccccaaaatttccgaagactggcgctatcagtacgatggaatcttgacggcgatgaagacagccgcttccaaactgccgcgtgtggacgcgatcggcgtatccagcgcgggaatttaccgcaacaacaagatcatggtcgcgagcctgttcaataagatcccgcgggaggatttcgaccgtcacgtgaagaacatgtatctggacatcgccgcagagatcggcgcgcccgtcgtcgtggcaaacgacggagacgtgaccgcgctcgccgggagcctggacagcgagacgggagagctgttggggatcgcgatgggcacctcggaggcggctgggtacgtggacggggaaaagaacctgaacgggtggctgagcgagctggcgtttgttcccgtagactgcaatccgggcgcaatggaagacgagtggagcggagatatcggctgcggcgtcaagtatttttcgcaggacggcgtaatcaagctcgccgaaatggccgggtatcgctttgaagcggatctcacgcccgcgcagaagctgaaagtcgtgcagaagatgatggcggacggcgatccgcttgccgggcagatctatcacgatatcggggtttacctcggttatgcgctgccctattacgcggagttttacgcgatcaaagaggttctgctgctcggccgcgtgacgtccggaaaaggcggggaatacgccctttccgtcgcccgtgagatattgaaagaggaattcggttcggatatcgttctgaagatgcccgacgaaaagcagcgccgcctcggccagtccattgccgcggcaatgctgcccgaagtaaaataa

SEQ ID NO: 1291 - DNA, 768 bp, Unknown
  BMI gene
  misc_feature: SEQ ID N?3088158
atgctgttggcaatcgacatcggcaatacgaatatcaaatacggcgttttcgacggggacacgctgaaagccagtttccgcgtctcgtcccgcgtcaccaagacggcggacgaatacggcgccgtcctgctcaacctgctgagcagcaagaagatcggggcggaagagatcgggggaatcatcgtttcctccgtcattccctctctgaactatacgatcgtccacatgtgcgagtatttcttcggaaaaacgcccatgatgatcggcccgggcgtaaaaaccgggctcaatatccgcgcggagaacccgaaggaagtgggggcggatatcatcgtcaacagcgtcgcggcgttccgcaagtacggggggccggtggtgctcatcgatttcgggacggctacgacgttcgacgtcatcaccgcaaaggaagaactggtcggctgtatcatcgccccaggcatcaagaccgcgctggaaagcctcgtgcagggcacggcgcagcttcccatgatcgaactttccgttccgaaaagcgtcctgggcaaaaattcggaatcttctatgcaggcgggcatcatcttcggctttgccgggctggtggaaaatatcgtggcgaaaatcaagcaggagctcggcgtctccgcgctcaccgtggtcgccaccggcggcatgggggaaatcatcgcgaaagaagtttcgtgcatcacgcatattgacagaactttgaccttggaaggcttgaagatcatatacaatttaaacaaatga

SEQ ID NO: 1292 - DNA, 639 bp, Unknown
  BMI gene
  misc_feature: SEQ ID N?3089940
atgccgaaagaagtttatctccgattgccggaggagaaaaagaagcgcgttaaagaggcgatcgcagaagagctgtcccgcgtttctttggaagatttctccatacgaagggtgacgaaacgggcggaaatcgcgcggggcagcttttatcagtattttgacggcgttcccgacgcggtgctctgtgtgctggacgattatttttccaatctgaaagcgctcatccccgcgctggtggaagaatatcgttacgacctgtttgaagtggagctggttctgttcgatcggctgaagcaatactgtgaggagagcggagaaaaactcattctcagcaatctcggcaagagcttccgcataagtaaggtgaacacgctggaggtgtttccgcacgaggtggagcgcctgaaagagtttatatatgaacatctgagcagccgcgcgtgcgggcagtttacgaaagaggatatctacgatgtcattcatctctccgcgctgctctttcgctcagcgatttccgaattgttcagcgaatatgaacgcagagaggaaatttcgcgcaggttccgcaatcagatcgctatcgtacggaggggttttataacagatgaaggacagaacagaccgcaaaacgctccctga

SEQ ID NO: 1293 - DNA, 189 bp, Unknown
  BMI gene
  misc_feature: SEQ ID N?3090704
ttgaaaaagataatactgatactcgttataatcggggcattaaactggggctttataggctttttcggctatgatgtcgtatcgtcaatcttcggtcctaatcttgaggttgtcagcagaataatattcgctatcgtaggacttgccggactttattctataagttttcttttcgagaaaaaatcataa

SEQ ID NO: 1294 - DNA, 465 bp, Unknown
  BMI gene
  misc_feature: SEQ ID N?3092252
gagcggcattgcggggagagcaacatggcgatcgcgtttgcgggaatgtatatggtatgcggcatcataaccgcgcgttttttggaaaagagaaaaatgcgcgcggcgacggtagcgcatgcccttttatttgtgctgattgctcttttgctgttgtttatgcccgcatccggcgggatcgcggcttttgcgcgcagtctgttcggcggctattacgaagcggtcagagaggcgctatttgcgcaaaaagaatttctgggagcggcggtttcagccgcgctgacggcggagataacggtggtcattttgtttttgctgtcgttggcggcgctgtttctctccgttgcggaaccattttcttcctccccggcggcagagcgcgtttctctgcatttcgtgcattttgcaaagacgctgcgccgctcttatccgatgtggctgaaattctgcaggctgaggagctga

SEQ ID NO: 1295 - DNA, 576 bp, Unknown
  BMI gene
  misc_feature: SEQ ID N?3095823
cccgaggcggcgaaggcgatgggcgatttgctgacctaccactacaaccagacggaggagcagttgctcgttcgggcaggataccagcaggaatcctcggttaccaacgggaattacgaccaacaggtcggtctttccgcaagtattgacaacgatatggacgtttcgctgaaatcggacacctgccagaagctgatttccgagggtgtgaaattcggcttcatccagcgcttcccgaacgggaaagcttccgaaaccggcgcaagcgggtgcacgaatgtgttccgctatgtcggtgttccgcacgcaggatatatcacaagtcagggaattacgctggaggcttatctgagcctgttgcagtcggattacacctactccaagtcgcatctgctcctgaatgcggagggcgaggaggtcaaggcgaaggatgcggtttacgaggtttactacgtggaagcgaccgccgatggcacgatgtcagtgcctgtgccgaagaactatcggtacaccatttcgggtgacaacatgaaaggcttcatcgtaacggtgaatctgagcaaaccgattgcataa

SEQ ID NO: 1296 - DNA, 309 bp, Unknown
  BMI gene
  misc_feature: SEQ ID N?3001933
atggctgaaagaaaatccgttgcgcttcatgtccgtgagcttgtcgctccgactgcagacgaactcggactgaagctctgggatgttgaatatgtgaaggaaggcgcggactatgtgctccgcataacgatcgattccgacgaaggcataacgatcgacgactgcgagcgcttccaccgcgcgatagaccccgtcatcgacgaggatgacccgatagagaattcctacaagcttgaggtttcctcccccggcgtcgagcgcgtgctcacccgtccggagcacttcgaggcaatgaagggagccgaggtc

SEQ ID NO: 1297 - DNA, 237 bp, Unknown
  BMI gene
  misc_feature: SEQ ID N?3103035
atgaatactttgaatatcaaaacatttgaaagtaaaaataaagtcggagaacagacgatgacgagcaaagtgattggaaccggttcctatgtgccggaacgggttgtaacgaatgaggatttggcaaaagttgtagatacgaatgatgagtggatcgtcacgcgaacaggaatccatgagcggcggatagcgatggatgagggaaccagttttatggcagcggaggcttcacggcgt

SEQ ID NO: 1298 - DNA, 318 bp, Unknown
  BMI gene
  misc_feature: SEQ ID N?3106158
atgaatgtaattttcgcgctcgtgaccgtgctgtcgctcgcaatcctgatcttcactgaccccgaaaccgtgctcgccgccatgatgaacggcggaacgaaagcgctggagctgtcgctgaaaatggcggtgatctatgcggtctggttcggcatctttgaagttctgaagcggacaggcctctccgaaaaaatcgcaaagctcttaaagccggtcaaccgctttctgttcggctccattcccgaagaggcgggcgggctgatcgcgctcaacatgtccgccaatattctgggcgtttcgggcgcgacgacgcccttc

SEQ ID NO: 1299 - DNA, 153 bp, Unknown
  BMI gene
  misc_feature: SEQ ID N?3106324
gtgaacaaagaaggtcgtggtcgttcggctcacgattggagttcccaaatgagagttggttcgctctcccgaataggctgtaaagctgaaaaccaaggaaccttacaaaagattgataatgctcctgagaaatgtcaggagcattttttttga

SEQ ID NO: 1300 - DNA, 204 bp, Unknown
  BMI gene
  misc_feature: SEQ ID N?3109891
gtgcagatcccctgtatcgagcggaacgcggtggcggcgatgcgcgcggtcaacgcgctcagcatcgcgaattttctgacctatacgcgcaaagtttccctggataccatcatcgagacgatgtatgaaacggggcgcgacctctccgggcgttaccgcgaaacgtccgaggggggattggcgaagctgtaccgcggggagtga

SEQ ID NO: 1301 - DNA, 615 bp, Methylocella silvestris
  misc_feature: SEQ ID N?3110058
gttgcagaaggctttagtggagttgattttgtatttccaattcaattaggagaatgtattgacgaaattgcagaaaatgcgtacaatgaatatttggtaagaataaaagcagcaacttctaaaaaagaagagtttaaagcaggaattgtaataggaagctatgatttattacatgcgggacatatagaaaatataaaattagctagtgaattttgtgaaaggttatatgctgttgtaaaaactgatgagagaattttggcaaataaaaacaaaattcctatgcaaaatacaacagaaagagcaaataatgtaaaacttttaaaatcagttagtggagtaacatatatggatttggattcaactagggaagatatagtaaaagatgtaatagaaatgtacaaagaggaaacaggaaaagaaataagtgaaagtgaaatagtagctgtttttggagaagatttgaaagaaaaagaagaaatacataaaaaagaatggggagatgtaagtttaagatttacatctagaccagtagaaaaaatgaaaaaagtttctagttcatcatatcaaaagaaaataaaagaggctggtggaattgaagtgtatgaagcaagagaa

SEQ ID NO: 1302 - DNA, 198 bp, Unknown
  BMI gene
  misc_feature: SEQ ID N?3113095
atgaccgggctttcccgcgcggagatcgccatggcgggagaccggctgaacacggatatcctgttcgcaatcaactccgggttccgctcgattctggttttaagcggggaaacgaccgaaggggcgctcgccgcctctgcggtcaggcccgacctggttcttccctcgatcaacgaaattttgaaagaaaccgaataa

SEQ ID NO: 1303 - DNA, 735 bp, Unknown
  BMI gene
  misc_feature: SEQ ID N?3113468
atgaagaaaattttaacgctggcagcggctgtgctgctttgcgcagcctgtatttttacggcgccgcttccgcgcgccaatgcggcggagacaagtgcgattgccacctattacgcgcgctcgcagacgctgatgacgccgccgaccgtggtgacgcgactgaacagctccctcgatctggaggcgtttgccgggcgggtatccggtaccatggtgcgcccgtccaatctgattgtgccggtcgatgcggaaatgaatgcgctggacgaaaacggcgctgtgatgatgccgtttgcggaattatatcagacctatctcaggacaaaaatcatccctctgcttgcagtaaacggcgaagcggcggcgcagagcgtaatttcttttttgaatgaaacgggatatgccgatatcggcgtcctgtcatctgacgtcgcccttgtcgaaggcgtgcgccgggcatgccctgcggtacgcggcgtatgggatctgtccgcggcggatatcggggcaaagactgccgggaaattagtaatcgaagcgaataccgcgggcgtacagacgatcattttcagcgcggaacaggtgagcgaacagttcatttttgatgtacaggcgcgctttaaaacggtatggctcgccccgcaagaagaaagcgaattttcggtttattccgcggtttccaagggggcctatgggctgattgcagacgattacgcggagatctacgaatgttac

SEQ ID NO: 1304 - DNA, 348 bp, Unknown
  BMI gene
  misc_feature: SEQ ID N?3114498
cagctgcgcggcagggtgggccgcggcagtcagcccgggtattgttatctgctcacctcctctggggatgaggaagcgctgcagcggctgaagatgctggagacgctcagcgacggctttgagatctcccgttatgatctcagcctgcgtggtcgcggggatctgctggggaccaggcagagcggcgtgccgggcttcgtgctgggcaatgtcatcaccgatgaaaagatgatggaggcggcgcgcagcgacgcggcttatgcgcttcagcatctggaggatgaggagtacgcctgcctgaagccgatcatcgagcaggatgtaaaaaaatcagcttattttgattag

SEQ ID NO: 1305 - DNA, 207 bp, Unknown
  BMI gene
  misc_feature: SEQ ID N?3116845
gcgctgagtttggccggttccatcatcgtggagcgcatcttctccctgccgggcttaggatatttggtgattgaaagcgtactgaaccgcgatgcgccgatgatccacgccgccatcgtgtatctggcattttccatcgttctgtttaatacgctttcggatattttacagcgtgtattacccggtggtgccgcaaaggaggtgtga

SEQ ID NO: 1306 - DNA, 762 bp, Roseburia inulinivorans
  misc_feature: SEQ ID N?3119535
atgatctataccgtgacgctgaacccggcggtagactatgttgtgcatgtcccggcgctgacccaggggcagattctgcgcagcacccgggagcaggtctttttcggcggcaagggcgtcaatgtttccagcgttttgcacacgttgggcgttgcatccgtcgccacgggctttttggccgggtttactgggcaggctatcgagacggagctggcgcggcagggcattgggacggattttgtcttcctgccggacggctttacccgcatcaatctgaagcttcgtaccggcgtggagacggatatcaacggcggcggcccggtgatcggcccggcagacctggcggcactggaggaaaagctgacgcgcctgcgggccggggacattgcggtcctggcggggagtgtaccattgtcgctggcgggcaatccgtatgcggacctgatggcgcatcttgccggtcgggggctgcgctttgtggtcgataccacaggcgcgcagctgcgcagtgtcctgccgcttcagccgtttttggtcaagccaaacgggcaggagctgggcgagctctttggtgtgcgcatcgcgtcggcggcggaggcggctaagtatgctacccggctgcaggagctgggggcccggaatgttttggtctccctgggcgcgcagggggcggtattggcggacgagaccgggcgcatctggcagcagcccgcctgccggggcgagacggtgaacaccgttggcgcgggggactccatggtg

SEQ ID NO: 1307 - DNA, 669 bp, Roseburia inulinivorans
  misc_feature: SEQ ID N?3121268
atggaaaaatatcgaggaggcaatataatgagagagattttatgttttggagattcaaatacttatggatatattccgggtcattatgagaaagcaccggcacgctacccgtggggaatccgctggaccagtctgttaaatgaaaaactgggaaaagaagattaccgggtaatcgaggaaggactgtgcggaaggacaactgtgtttgaagattctttccgggcatacagaaatggttcggagatgctgccggccattctggaaacacatcagaatgtggatctggttatcctgatgctcggaacgaatgactgcaaagcggtatatggcacgactccggagattatcggacgcggcatcgaaaaattaatccgacagctccgggaatatgcaccggaaagccagttattacttgtttctccgattcatctgggggaagatgtatggaaaagtgagtatgatccggaattttccatggaatccgtggatatttccaaaggtctggaagcagtatatcagagaattgcagataaagaaggcattccatttcttgcggcatcttcagtggcacagccaagtaaaacagatgaagaacatatggacgaggaaaatcatgctttatttgcacaggcagtatatcagaaaataagccgggaaatattccgatag

SEQ ID NO: 1308 - DNA, 291 bp, Unknown
  BMI gene
  misc_feature: SEQ ID N?3122770
gtggggctggaaacggcgtttcccgtgctctatacagaattggtaaaaaaaggcgtgatttcccttcataagctgatcgagctgatgagcgtcaatccgcgcaggcggttttcgcttcccgcggagggagagacgctttgggatctttcacaggaatatatcgtcgacccgggcgaatttctcacgctcggcagagcgtctccgtttgcaggcaggcgcgtgacgggcagatgtatcatgacaaaagtaaacgggaggattgcatggtcggagatttcaacagaaaaataa

SEQ ID NO: 1309 - DNA, 1197 bp, Unknown
  BMI gene
  misc_feature: SEQ ID N?3125100
aaattactagaagaagacaaagactttgaaaaattcaaaacaccagaaatagcaagcattgtaaaagaaacagataaaaaatatgatacagatttagaagaaacaatcgcaaccgaaagatatagctatatagaaaaagttaaaaaagcaagtatagaaaaacatcaaatgccagagaccatatcagataaactagataaaatattcttaaataaatggcttgcatttccaatatttgcaataattatgtttttagtttattacttatcagttggagttgttggaagctttacagttgattggataggagattgcataggcacacttggagaaacagtaggtacagctcttgaaaatgcgggaacatcagaatggttagttagcttagtagttgatggaatttttgcaggagttggagcagtacttggctttgtacctcaacttattatattattcctttgtatatcaatactagaaacaacaggctatatgtcaagaatagcactatttctagataagctatttagaaaactaggcttaagtggaaaaagcttaataccatttatagttggttcaggttgcagtgttccaggtataatgagctcaaggattatagaaaatgaagacgaaagaaaaatgacaacaatattaacaccatttataccatgtagtgcaaaactaccaattatagcattatttgcaggttactttttcccagataactcaggagtagtatcagcatcattatatttctttgcaatagctgtaattatatttagtgccattataatgaaaaaatttgtatttaaacatacagaaagcacctacatatcagaacttccagaatataaagtaccaagtgcaaaatatgtagcaaaagatgtatttgataaagtaatagcatttataaaaagagcaggaacgattattttactatgctcaatagttatatggtttttactatcattctcatttaaaatgaaatatggagtagaaatacaagacagcatgctagcaacaataggagacaaaatttcttggatatttgaaccaatgttaggaacaagaagctggggagcaacagtatcagcaatacaaggattagtagcaaaagaacaagtagtatcatcaatggcggtaataaacggattagcagatgatgtagaagaaggagcagaaatatttgcaaaaacagga

SEQ ID NO: 1310 - DNA, 165 bp, Unknown
  BMI gene
  misc_feature: SEQ ID N?3125541
atggttggatatgatgatacctacttagaatttgcagaaaatgatgatcgattgagctctgtggggcgaaatatttgcgaaggatatccggaatatattattccggagtgcgcagaaacaaaaacaaaaaggaatgtgaacgaatatttgtggcttcacatgtga

SEQ ID NO: 1311 - DNA, 417 bp, Faecalibacterium prausnitzii
  misc_feature: SEQ ID N?3128094
agctcctactgtgccgagctgttcgccagttccatccgggagttcggcaagggcaagatcgtgggcgtgaccaccgccggcaagggcaccattcaggcagacccctaccagctggacgacggcagcgccgtggtgatcaccgtggcaaagatgctcaccgcaaagggcgagagctttgacggcgtgggtgtggccccggacgtggagtccaccctgaccagcgagcaggagcagaacttctatgacctgaccccggacagtgacccccaggtggcccgctgccaggaggtgctggcccagacgctgggcagcgacagcacggacgaggagggcgatgcctctgaccaagacgtgaacaccaccgagaatgccgaaaacaccgaggagggcagcgattccgcctccagcgagggctga

SEQ ID NO: 1312 - DNA, 324 bp, Unknown
  BMI gene
  misc_feature: SEQ ID N?3129139
atgagcgaattatatgaaatcggctccaaagaggagtttgaatcgctggtggcgggggatacgcccgtcctcgcggatttctgggcgacctggtgcacgccctgcaagatgcagtctccgattctggcggattttgccgccgcggcgggggacaaggtcaaggtcgtaaaggtcaacgtggacgagaacgaggcgctcgccgcgcagtacggcattatgtccattccttcccttctggtattcaagaacggagaagtggtggataagaaaatcgggctgacgcccaaagccgagctctccgacatggtcatgaagcatatctga

SEQ ID NO: 1313 - DNA, 222 bp, Unknown
  BMI gene
  misc_feature: SEQ ID N?3131537
atgaatgacgcgctgacaacgctcggtcgcgaagccgaggcggaatttgaggaaaaaaagtcggtttttattgcgcacgtctgccctgtttcggacgaagcggcggcgcaggactatatcaggcggaagaaagccgagtttgccgacgcgcggcacaatgtgtggggctatcggatggcgggggatatcattgtccgctgttcggatgacggcgagccgcag

SEQ ID NO: 1314 - DNA, 234 bp, Eubacterium siraeum
  misc_feature: SEQ ID N?3134065
atggtttttgcgcttgcgcttatcgcaaacggaatgataacactgccgtcggctgtgataagagttgtcggcaagggcagtatatttgtgtccgacctttcggcgcttacaatgctgttttttggagcggcaagcctgctgttcggactgggacttatacttctgagcacggcaagactgtgtcccgccgcggcatcatatgtatacagacttttctcgtccgttaaagaatga

SEQ ID NO: 1315 - DNA, 243 bp, Unknown
  BMI gene
  misc_feature: SEQ ID N?3142255
atgtatcgaattctgaaaaaggtgatcacgttctgcgtgcgtctggcataccggatcatctatcatttgatcccaacgcagaagcataccgtcttgttcattgcctttcacggcagaggttgtctggataatccgctggccctgtatgaatatatggacagccaggagcgttttgcggactatcgctttgtctgggcgctgaaggagccgaggacctttgactctccgcgtaccagatctgtt

SEQ ID NO: 1316 - DNA, 528 bp, Alkaliphilus oremlandii
  misc_feature: SEQ ID N?3143623
atggttatgagtaaaacagcaaacataaaaatgatttgtctgacaggtatgtttatggcactgatttgcattgcaaccttattttttaaagtgccgattccgcttggttatgcacatcttggaaacggatttattttcctggcaggagcatttctggcaaatccgtatgcattgattgcagcaggtgtaggctctgcccttgccgatttgctgggtggatatgcagagtggattcttccgaccctgattatcaagtgtatcatgggagcagtgattgcaggaattgcggcaaacggaaaagtggcatcacttcgtacatttgcagcagtggttgtgggaatgctggaaatgattgcaggatataccatagcaggtgctattttatatggcagtgtggcagcaggcctctcacagattccaggactgacagcagaaggaatcgtaggaatcatattattttatgcagtgggtatgatttgtgagaaaacaggtgtaaagaagtattttacacaggtaaagactgcatag

SEQ ID NO: 1317 - DNA, 555 bp, Unknown
  BMI gene
  misc_feature: SEQ ID N?3144515
ccgaatggcagacaggcaaaaatatttgacagaaaagaacaggagtttacattgggaagtaaattcagaggtaaatttggtgcgtgtaaggatgtcttaaaacctaatagattgttattatcctgtgcagcaaattttacttcgataaaagaagtggaagatgcattttgctttttcagcaatgaattggttgtttatgcaccggaaaaccagggaaattggatgaattattctttatatcagattaatgcaaatgaaaaaatgaaggaagcagtcatttcatttatgaggggattgggaatgggagtgaaagatataaaggtaaacattgaccaaaaagagatggaagcatttgagctgccgccatttttgtcggatgaatttaaaaatatactattacagacgaaagttgatgacattacagcaaaagtagtatatgagaaatttgaaacagatttgatgcaggatgaatcaacaggagttcagaagttatttggtttattatgtccgctgatagatattatggtcaatggtaaagtgcttatttgcgatgaa

SEQ ID NO: 1318 - DNA, 1851 bp, Unknown
  BMI gene
  misc_feature: SEQ ID N?3145625
atgaaggtcatcaaattaaaaccaaagagacttttgtctttgttattagtagtttgcacaatttcttctctttgctttccatcttcttatatcgtaaaagccacctcttatatttcgacatcacagtttacatataaggataacagttggtcagccgttgcaaatacttacacatcgaccagtccatctctcacactgtctgccatacaatccaatgatggtaacgtatatttcccatcttttgctgattttaaagcaggcgtaaatggaacggcattagcaaacggtggtagctatgatggtacattagctctatctcaaaatagtaaagaagtttttaataaggcaaaacgaatttttataggaaatgattacgaaacaattcctgctaattatttgagtgagaatacctctattgaagaaattacgattgatacagaaaatgatattaccttatctactcgttgtttctcatctatgtccgctttgaaaaatgtcacaatcaaagccaaatccattaccatacaaggaagtgtatttagaaactgcgaaaatctagaaaacattacccttactggatcggttacttttacaggtggcagtgacagcggctataatttttcaaattgtccaaaactaaacatggtaaaattcaataacgacgttacctttaaggatgcaaacaattttacttctactacattctctacagcgagttccgcaaatgtaaccttcaacggagctattacaaatgcaaatacggttttctccgcatgtaatttaaaagacttaaatttaaacggatcaggaaatacccttacaaactcgtttttagaaaatacaacgattacaaatctaaatgtaaacgcagctactacatttggtaaaaaggcactttattattctgaaaatactggggttataactaactttaatataaatggtgctttgaacgaagcattgactacaacatttgaacaatacgcaatttattccttctccagagactactctgttattactaattttacgatcaataacaaatgtaccttcggaaactatgcactatatcatgtaggaatagaaaatttatactttaatatagataaccgtggagaccgtgaatttgtcagttacgaaaaagaaggtgaccgccttggttacgaaacaaccgttcacaacatcttctttaattatcaaaacacctcaggagcaacaggtcagacaatggaattaaatcattttcctcttggagatgattccacaacctctctaaattgtgactctatttactttttacatcctgattttaagtatatcggaggttctgattataatcgttgtgatggggaaaagacaaatgtatatggatacggcggtgcacttgcctatgatgatgacggaaacttactttccgcctatgagatgtatcaatcttggatgaaaaacaagtcctgcaattatcacaattatgtttcgaacgcagatacgttagactacgagattaaaaacacaattatttatttaggagaagatgaaaaaacagtatcttatgattttgcctctgatgcaaatatttctgtttatgcaacctatgaaaaggatgccatcaatccacctgtcaccgatggaagcaaattcaaactttccatcataacaggaagtaaggtatctacaaattataattatcgtatattagaaaaaaatgatagcgtaacggcttctaccaaagagctttatgcctacaagtataatggaagttactacactccttgtaccacttccaccgtatccttaacagcaggtacacatgaatttttattagaagtgggcggtgtaaaacatccattt

SEQ ID NO: 1319 - DNA, 969 bp, Unknown
  BMI gene
  misc_feature: SEQ ID N?3146945
ctgaccctgccggacgggcagacaataacgttttccaaaacggacgaaaatgcggagaagatgacggcggcggttgcctccggcgagacggcgcagaatctgaaggtcgaacgcacttataccgcagggtatctgacgaagctgtgctgcggcgaagatgaagacgttttgacttatacctttgagtacgacggattcggcaacagaacggcctgcttcctgaacggaagtctgctgaaaaaatacctgcattatcgcgaagcaaattatcttccgctgccgggacagtaccataattacgacgaaatcacctatgccacgggcaagatgcggtatgacgaattcgataaacgcggacggttggtcagcagaaaggagagggacggcggcaccgcgtatcaggaggttctcagaatagagtatttcccgggaaaagactatatctccaaagtaattgacaaaagcgcggcgatccaatataatgaaggtaacagcgcggataagtggctgacgagcgttttttcttacaatatcaagggggaactgaccggtgtaagcaatacgggataccgcaccgcaaatgatacggtcgtgacggaaaacgggcggattacgtccgaaaagacggaaatcgccccctatctgtcgcagaaaaccgagtatcgttacgaggaaagaagcgccggcggcgtttatcccgaccatcgcccggtggaagtgcagaactattatcatgacggaacgggctatgcggcgtatcccgcatactgctatgattacgacgagctgggacgggttgtcggcgagggaatggcggacagaacggagttcagcgttcagtatcagtataaaaagcgcaaaaaactcgtaaacggcgccgttacggatgataccgccgaaacaaattacattgagaagatgagctatcggcgcaggggctggaatctcggagaagaaacctatacttac

SEQ ID NO: 1320 - DNA, 348 bp, Unknown
  BMI gene
  misc_feature: SEQ ID N?3147213
atcgacaacagccgcatcgtggaagacgggccgacgagcgaaattttcatcaacccccgttcggaaacggcgcgcaagctgattcttcacacgggcgacgcgcccgacacgacgggcggagaaaagctccgcctcatcttcgacggcacctcttcggaagaacccgtcatttcccttctggcgctcaactgcggcattaccgcgaatatcctttacgccaacacgaaggacgtcggcggcaggatctacggcgaaatggtggtgcgcgtccctgcggacggcgcgtccgtcggcaaagcggagcggtttctcgccggcaagggcgtcatcgtcaaggaggaaagttaa

SEQ ID NO: 1321 - DNA, 534 bp, Unknown
  BMI gene
  misc_feature: SEQ ID N?3154733
gtcagcgttcgggagtccgagaacagtgccgccaaggaacgcattgcgaaggaggcggcaacccgcgtgcacgacggggacacgctgcttctcgactcttcttcgacggtgcggcgcatgatccgctatctcggcgaccgccgcgacctgtgcatcattacgaacaaccagcgcatttttgaggaatccgttccgaagtccttccgcctgttctgcacgggcggcagtttccgacaggagaaccacaatttctgcggccctgcggcggagcagtttctgcgcacgattcacgctgacctgctctttttctcgggtcagggcgtctccgaagccggagaaatcaacgacgtttccgaggaagaaacctccctgcggcgggttatgctgacccgcgcgcagaaacgcatcttcctttgcgattcctccaaaatcggcatctcccgccagttcgtcctctgctcgctcgacgacgtggacgaggtgatctgcgacgcgcctgagaggatgccgacgggaagacctcggggcgttgcc

SEQ ID NO: 1322 - DNA, 423 bp, Clostridium hylemonae
  misc_feature: SEQ ID N?3173038
gggatgagcgcccaccccgccgacgactacgtccgggacttcaccggcagcgccgacaagtccaaggtcttctcggcccgaaacattatgatcacccccaccagcatcgcccgcctcaccgacggcccggagcacgccatccacgagatgaggaaaaacgccctgtccactgtctatgtggtggatgaccggctgcgtctggtgggcatcctcaccatccgggaggccgtccgcgcccaccaggaggggctgaccatcgaacaggtcatggaaaaggatatccccaccaccacccccgacgccatggtgtccgacatcatgcccatggcggctgagacgatctaccccatcgcggtagtggatgaggacggccagctcaagggcatcgtcaccaaggccagtgtgctgtcctctctgatttaa

SEQ ID NO: 1323 - DNA, 618 bp, Unknown
  BMI gene
  misc_feature: SEQ ID N?3175284
atgtcgtttccatttataaaagatgcttgcttcgcgaagtatagcgagcaatataatgcggcctttttcgatgcaattcgccgtcttgatttggaatctatttccttattcatcgaatcaaaacctcggaatgagttaatgaaacttgttgatcgagatggcaattctcctcttcatgttgcattacttgtctcatgttcccaacaaaacagtctcatctcgctccagcaagaaattatccaacttttcattacactcaaatttgatgagcatcagaagaatcagcaaggtgtcactcctctggatctggttatgcagtgtcctattcaatcaattcgagagctattcccagaatatcatgttccagaggtgctcgaggttctctcccctgaggcctcactcaaagttgccacacctctgactacttcaatagaacctggtgaggaggagacggagtcgcttactccagtggtccccagccctaactctggtcagcctcaactgaggccttctagtactgtagaggagctgttaggagctctgggccttcaagaatacattgatacgttcagaaacaaggtagggataagaagagagattgaagatagggctacgtag

SEQ ID NO: 1324 - DNA, 726 bp, Clostridium beijerinckii
  misc_feature: SEQ ID N?3175391
ttaaaaacaaaattatcattacaggaggtatttattatgggaaaaccattagctgattatgtgaaacttccggagttggaagagtataaggagtggtttaaaaattttgcggatttacatcgagaagatggcattcttcaagtgacatggaaaacgaatgatggtccaatgcatcatagcggtatgtctcaccgtgccattagtcaactggtgcgtgtgttgtccctggattataagaatgaaattatcatttttacgcacattggtgataattggatgattgaatccgatgctaatggttgggagacgtattcggagttgccgactcagcgtttccagcaccaatattttgatgacaccaatcttatcaagaatatgctttttgatttagatgtacctacgattggtgctattcctggtccgggctttcattgggattgtccgatgctctgcgatgtaaccatctgcactgaagataccaagatagaagtccctcatgctcaaggaggtatggttcctggtgatggtatgggtctgctatgccagcactactttggaaccaaacgcggcaactattatatgatgaccacccgtcagtttaatgcgcaacagatgttggactggggaatggttagtgaagtcgtcgcgaagggaaaggcgttggaacgtgcatgggaaatcgcgcgaatgtggaaacatatgccatatgagaatcgtacaattatg

SEQ ID NO: 1325 - DNA, 177 bp, Unknown
  BMI gene
  misc_feature: SEQ ID N?3181255
gtgcaacagcaagagtcagaaatgaaggagaatcttcccgttccttataatggagactcggactcagaagaagaaccttatattgtatcccaagaaccggagaaggaacaacctgttgagaaccagacggagaaagagaatcgagttggtgagaattcgacaagtgaagtactataa

SEQ ID NO: 1326 - DNA, 918 bp, Desulfitobacterium hafniense
  misc_feature: SEQ ID N?3192174
atgtttggattaagaagcgacggcgtcaaagtaaaatgcgccgatcccatcgacaaaatcgttccgcacatcatgaaggagcggtccgattccatgaacaataccgtcatcgagcagcgcgtcgagtcgttcgacgcctggatcgacgacgtttaccgccgcacgggcgtggaattcaactacatgcacatcgtgctcgcgagcatcgtgcggctgtatgcgctccgcccgcggctcaaccgcttcgtcatgaacggcagggtgttccagcgccacggaatctacgcctctttcaccgtcaaacaggcgctgaaagaggatgcgcccgatctgacgatcaagatccgctttaccgggcaggagagcatttttgaagtcaaagagaagatggatgaagccatccgcagcgccatcgccgcgaacagggagaacggctctaccaaggtcgcgggcatcctgacggcggtgccgaattttctcatcaaattcctggtctggtccgtgaagtgcatggaccggcacgggatcatccccggatccatcctgaaagtcagccccttccacaccagcttttatctcacgaacttaaagtcggtcaagggggaatggatctttcatcacctctacaacttcggcacggtcggcctgttcgtcagcatggggaaggaaaaactggagccggtcgtcgaaaacggcgcgctttcggtgggcaaggtcatgaaaatgggcatcaccgcggacgagcgctactgcgacgggttttactttgtacagaccctgcgggcgtggcggaaatacatgggcgatccctcgctcctggaagagcggctggatatcgagccctttgaaagcccgaaggagcgcaaaaaacgcctgaaagaggaacaaaaggagcagaagaagagacagcaagcatga
